(19) United States
(12) Patent Application Publication
(10) Pub. No.: US 2016/0166671 A1
(43) Pub. Date: Jun. 16, 2016

(54) Clostridium Difficile Compositions and Methods of Use

(71) Applicant: VaxInnate Corporation, Cranbury, NJ (US)

(72) Inventors: Lynda Tussey, Cranbury, NJ (US); Langzhou Song, Cranbury, NJ (US); Scott Umlauf, Cranbury, NJ (US)

(21) Appl. No.: 14/875,789

(22) Filed: Oct. 6, 2015

Related U.S. Application Data
(63) Continuation of application No. PCT/US2014/033334, filed on Apr. 8, 2014.
(60) Provisional application No. 61/853,635, filed on Apr. 9, 2013.

(51) Int. Cl. A61K 39/08; C07K 16/12; A61K 38/16

(52) U.S. Cl. CPC A61K 39/08; A61K 38/164; C07K 16/1282; A61K 2039/55

(57) ABSTRACT

Fusion proteins include full-length flagellin or portions of flagellin fused to at least one Clostridium difficile antigen. Fusion proteins can include a first Clostridium difficile antigen that replaces at least a portion or the entirety of domain 3 of flagellin and a second Clostridium difficile antigen fused to the carboxy terminal amino acid of flagellin. Fusion proteins can also include at least one Clostridium difficile antigen fused to the most carboxy terminus of portions of flagellin or full length flagellin. Methods that employ fusion proteins are administered to humans to ameliorate Clostridium difficile associated disease.

### RELATED APPLICATIONS

[0001] This application is a continuation of International Application No. PCT/2014/033334, which designated the United States and was filed on Apr. 8, 2014, published in English, which claims the benefit of U.S. Provisional Application No. 61/853,635, filed on Apr. 9, 2013. The entire teachings of the above applications are incorporated herein by reference.

### INCORPORATION BY REFERENCE OF MATERIAL IN ASCII TEXT FILE

[0002] This application incorporates by reference the Sequence Listing contained in the following ASCII text file being submitted concurrently herewith:
[0003] a) File name: 37101058003SEQUENCE LISTING.txt; created Sep. 18, 2015, 666 KB in size.

### BACKGROUND OF THE INVENTION

[0004] Clostridium difficile is a spore-forming, gastrointestinal pathogen that is a leading cause of nosocomial infections in developed nations. Ingested spores survive passage through the stomach and ultimately reside in the colon. Clostridium difficile associated diarrhea typically occurs when antimicrobial therapy, such as the use of antibiotics, creates an ecological niche that allows the spores to germinate. As the Clostridium difficile bacteria colonize the colon, they produce multiple exotoxins toxin A (TcdA), toxin B (TcdB) and binary toxins. The Clostridium difficile pathogen can affect elderly patients, in particular during hospitalizations that lead to severe Clostridium difficile associated diarrhea and pseudomembranous colitis with case-fatality rates of up to about 10%.

[0005] Each year more than 300,000 cases of Clostridium difficile-associated diarrhea are reported in the U.S. alone and recently hypervirulent and antibiotic-resistant Clostridium difficile strains have emerged that are associated with increased morbidity, mortality and recurrence rates. For mild to moderate Clostridium difficile associated diarrhea, treatment with metronidazole or oral vancomycin is the standard of care, but recurrences of Clostridium difficile associated diarrhea are common with these treatments. While the elderly are still most affected, Clostridium difficile associated disease has been reported in what have been considered traditionally ‘low risk’ humans, such as healthy persons in the community, peripartum women and children. Currently there are no commercially available compositions for ameliorating or preventing Clostridium difficile associated disease and infection. A common treatment for Clostridium difficile associated diseases is the use of antibiotics. However, antibiotic resistant strains of Clostridium difficile are emerging. Therefore, there is a need to develop new and useful compositions and therapeutic methods to ameliorate or prevent Clostridium difficile associated disease.

### SUMMARY OF THE INVENTION

[0006] The present invention relates to fusion proteins that include flagellin and at least one Clostridium difficile antigen and methods of treating humans with compositions that include fusion proteins comprising flagellin and at least one Clostridium difficile antigen.

[0007] In an embodiment, the invention is a composition comprising a first fusion protein that activates Toll-like Receptor 5 and includes flagellin fused to at least one Clostridium difficile toxin A antigen; and a second fusion protein that activates Toll-like Receptor 5 and includes flagellin fused to at least one Clostridium difficile toxin B antigen.

[0008] In yet another embodiment, the invention is a composition comprising a first fusion protein that activates Toll-like Receptor 5 and includes flagellin fused to at least one Clostridium difficile toxin A antigen; a second fusion protein that activates Toll-like Receptor 5 and includes flagellin fused to at least one Clostridium difficile toxin B antigen; and at least one additional fusion protein that comprises flagellin fused to at least one Clostridium difficile binary toxin antigen.

[0009] In an embodiment, the invention is a fusion protein comprising a flagellin protein in which domain 3 of the flagellin protein has been replaced with a first Clostridium difficile antigen and a second Clostridium difficile antigen is fused to the carboxy-terminal amino acid of the flagellin protein, wherein the fusion protein activates Toll-like Receptor 5.

[0010] In an embodiment, the invention is a fusion protein comprising a flagellin protein in which at least a portion of domain 3 of the flagellin protein has been replaced with a first Clostridium difficile antigen and a second Clostridium difficile antigen is fused to the carboxy-terminal amino acid of the flagellin protein, wherein the fusion protein activates Toll-like Receptor 5.

[0011] In another embodiment, the invention is a fusion protein comprising a full length flagellin or a portion of a flagellin fused at the carboxy-terminal amino acid to at least one Clostridium difficile antigen selected from the group consisting of a portion or the entirety of a receptor binding domain of Clostridium difficile, a portion or the entirety of a translocation domain of Clostridium difficile and a portion of the entirety of a glucosyltransferase domain.

[0012] In still another embodiment, the invention is a fusion protein comprising a full length flagellin or a portion of a flagellin fused at the amino-terminal amino acid to at least one Clostridium difficile antigen selected from the group consisting of a portion or the entirety of a receptor binding domain of Clostridium difficile, a portion or the entirety of a translocation domain of Clostridium difficile and a portion of the entirety of a glucosyltransferase domain.

[0013] In a further embodiment, the invention is method of treating a human, comprising the step of administering to the human at least one fusion protein that includes a full length flagellin or a portion of a flagellin fused at the carboxy-terminal amino acid to at least one Clostridium difficile antigen selected from the group consisting of a portion or the entirety of a receptor binding domain of Clostridium difficile, a portion or the entirety of a translocation domain of Clostridium difficile and a portion of the entirety of a glucosyltransferase domain, whereby administration of the composition ameliorates a Clostridium difficile associated disease.

[0014] In yet another embodiment, the invention is a method of treating a human, comprising the step of administering to the human at least one fusion protein that activates Toll-like Receptor 5 and includes a flagellin protein in which domain 3 of the flagellin protein has been replaced with a first Clostridium difficile antigen and a second Clostridium difficile antigen is fused to the carboxy-terminal amino acid of the flagellin protein, whereby administration of the composition ameliorates a Clostridium difficile associated-disease.

[0015] In yet another embodiment, the invention is method of treating a human, comprising the step of administering to the human at least one fusion protein that includes a full length flagellin or a portion of a flagellin fused at the amino-terminal amino acid to at least one Clostridium difficile antigen selected from the group consisting of a portion or the entirety of a receptor binding domain of Clostridium difficile, a portion or the entirety of a translocation domain of Clostridium difficile and a portion of the entirety of a glucosyltransferase domain, whereby administration of the composition ameliorates a Clostridium difficile associated disease.

[0016] In yet another embodiment, the invention is a method of treating a human, comprising the step of administering to the human at least one fusion protein that activates Toll-like Receptor 5 and includes a flagellin protein in which domain 3 of the flagellin protein has been replaced with a first Clostridium difficile antigen and a second Clostridium difficile antigen is fused to the amino-terminal amino acid of the flagellin protein, whereby administration of the composition ameliorates a Clostridium difficile associated-disease.

[0017] The fusion proteins and methods of treating humans with compositions that include the fusion proteins of the invention ameliorate a Clostridium difficile associated disease, such as by generating neutralizing antibodies in the human to at least one Clostridium difficile antigen. Ameliorating Clostridium difficile associated disease can be advantageous in hospitalizations where patients are particularly susceptible to disease consequent to a reduction in intestinal flora after antibiotic treatment. The fusion proteins and methods of treating humans with fusion proteins of the invention may avoid serious illness and death consequent to Clostridium difficile associated disease.

### BRIEF DESCRIPTION OF THE DRAWINGS

[0018] FIGS. 1A, 1B and 1C depict domains of toxin A (TcdA) (FIG. 1A), toxin B (TcdB) (FIG. 1B) and binary toxin (FIG. 1C) produced by Clostridium difficile. Toxins A and B (TcdA and TcdB) are single-chain proteins with discreet domains. GTD=glucosyltransferase domain, also referred to as the “catalytic domain.” CPD=cysteine protease domain. TLD=translocation domain. RBD=receptor binding domain. Numbers depict amino acid residues of SEQ ID NO: 15 for toxin A (FIG. 1A) and of SEQ ID NO: 16 for toxin B (FIG. 1B).

[0019] FIG. 2 depicts the domains (DO, Dl, D2, D3) of an exemplary full length flagellin (FL, STF2, SEQ ID NO: 54) and a fusion protein that includes Domains 0, 1, 2 and 3 and a Clostridium difficile antigen (Ag) fused to the carboxy-terminus of the flagellin (also referred to as “C-terminal” or “C-term” format).

[0020] FIG. 3 depicts the domains (DO, Dl, D2, D3) of an exemplary flagellin construct (SEQ ID NO: 55) and a fusion protein that includes, in sequence, the amino-domain 0, the amino-domain 1, the amino-domain 2, the carboxy-domain 2, the carboxy-domain 1 and the carboxy-domain 0 of flagellin. A Clostridium difficile antigen is fused between the amino domain 2 and carboxy domain 2 of the flagellin construct, which results in replacement of domain 3 of flagellin (after amino acid residue Ala 190) with a Clostridium difficile antigen. The flagellin construct is referred to herein as “the R3 construct” or “R3 formats.”

[0021] FIG. 4 depicts the domains (DO, Dl, D2, D3) of an exemplary flagellin construct (SEQ ID NO: 55) and a fusion protein that includes, in sequence, the amino-domain 0 (D0N), the amino-domain 1 (DIN) , the amino-domain 2 (D2N), the carboxy-domain 2 (D2C), the carboxy-domain 1 (D1C) and the carboxy-domain 0 (D0C) of the flagellin. A first Clostridium difficile antigen replaces domain 3 (D3) of flagellin after amino acid residue 190) and a second Clostridium difficile antigen is fused to the carboxy-terminus amino acid of flagellin. This flagellin construct is referred to herein as “the R3-2xAg construct,” “R32x format” or R3.2x format.”

[0022] FIG. 5 depicts exemplary fusion proteins of the invention.

[0023] FIG. 6 depicts capture enzyme-linked immunosorbent assay (ELISA) results for C. difficile Toxin A/flagellin fusion proteins. Comparison of R3.2x and C-terminal formats. ELISA plates were coated with polyclonal chicken egg anti-Toxin A IgY (Gallus Immunotech). Serially diluted fusion proteins (R3.2x format HL821, SEQ ID NO: 9 and C-terminal format HL928, SEQ ID NO: 25) were then bound and detected with polyclonal goat anti-flagellin IgG (Covance Research Products). Plates were developed with rabbit anti-goat IgG conjugated to HRP (Jackson Immunoresearch), TMB and H₂SO₄. Curves were fit with a 4-parameter logistic equation (Softmax Pro 5.4).

[0024] FIG. 7 depicts capture ELISA for C. difficile Toxin B/flagellin fusion proteins. Comparison of R3.2x and C-terminal formats. ELISA plates were coated with polyclonal chicken egg anti-Toxin B IgY (Gallus Immunotech). Serially diluted fusion proteins (R3.2x format HL822, SEQ ID NO: 10 and C-terminal format HL929, SEQ ID NO: 26) were then bound and detected with polyclonal goat anti-flagellin IgG (Covance Research Products). Plates were developed with rabbit anti-goat IgG conjugated to HRP (Jackson Immunoresearch), TMB and H₂SO₄. Curves were fit with a 4-parameter logistic equation (Softmax Pro 5.4).

[0025] FIG. 8 depicts in vitro Toll-like Receptor 5 (TLR5) assay for C. difficile toxin flagellin fusion proteins. Comparison of R3.2x formats for Toxins A and B. Serial dilutions of fusion proteins were mixed with HEK 293 cells (1×10⁴ per well) and incubated for 16-20 hours. Supernatant was removed and tested for the presence of IL-8 using an ELISA kit (BD Bioscience). OD values from the cell supernatants were converted to IL-8 concentration by interpolation from a standard curve run on the same plate. The influenza fusion protein R3.2x A/California/07/2009 (HL186, SEQ ID NO: 78) was employed as a control in the evaluated to fusion proteins that include Clostridium difficile antigens in the R3.2x formats. Toxin A antigen in the fusion protein referred to as HL821, SEQ ID NO: 9. Toxin B antigen in the fusion protein referred to as HL822, SEQ ID NO: 10.

[0026] FIG. 9 depicts in vitro TLR5 assay for C. difficile toxin flagellin fusion proteins. Comparison of C-terminal formats for Toxins A and B. Serial dilutions of fusion proteins are mixed with HEK 293 cells (about 1×10⁴ per well) and incubated for about 16 to about 20 hours. Supernatant was removed and tested for the presence of IL-8 using an ELISA kit (BD Bioscience). OD values from the cell supernatants were converted to IL-8 concentration by interpolation from a standard curve run on the same plate. The fusion proteins that include an influenza antigen A/California/07/2009 fused to the C-terminal of flagellin (referred to as HL184, SEQ ID NO: 79) were tested along with a fusion protein that included Toxin A fused to the C-terminal of flagellin (referred to as HL928, SEQ ID NO: 25) and fusion proteins that include Toxin B fused to the C-terminal of flagellin (referred to as HL929, SEQ ID NO: 26).

[0027] FIG. 10 depicts TLR5-Fc competition assay for C. difficile Toxin B/flagellin fusion proteins: comparison of R3.2x formats for Toxin A and B fusion proteins. Serial dilutions of R3.2x format fusion proteins (influenza R3.2x CA07 fusion protein control, SEQ ID NO: 78; Toxin A fusion protein referred to as HL821, SEQ ID NO: 9; Toxin B fusion protein referred to as HL822, SEQ ID NO: 10) and constant TLR5-Fc (R&D Systems) were preincubated for one hour. ELISA plates were coated with flagellin. Fusion proteins and TLR5-Fc mixes were added to flagellin-coated plates. Unbound TLR5-Fc was washed away and bound TLR5-Fc was detected with rabbit anti-mouse IgG conjugated to HRP (Jackson Immunoresearch), TMB and H₂SO₄. OD values were fit with a 4-parameter logistic equation (Softmax Pro 5.4).

[0028] FIG. 11 depicts TLR5-Fc competition assay for C. difficile Toxin B/flagellin fusion proteins: comparison of C-terminal formats for Toxin A and B fusion proteins. Serial dilutions of C-terminal format fusion proteins (influenza HA CA07 control: SEQ ID NO: 79, Toxin A: HL928, SEQ ID NO: 25; Toxin B: HL929, SEQ ID NO: 26) and constant TLR5-Fc (R and D Systems) were preincubated for one hour. ELISA plates were coated with flagellin. Fusion proteins and TLR5-Fc mixes were added to flagellin-coated plates. Unbound TLR5-Fc was washed away and bound TLR5-Fc was detected with rabbit anti-mouse IgG conjugated to HRP (Jackson Immunoresearch), TMB and H₂SO₄. OD values were fit with a 4-parameter logistic equation (Softmax Pro 5.4).

[0029] FIGS. 12A and 12B depict mouse serum ELISA for C. difficile Toxin/flagellin fusion proteins: post-prime: comparison of R3.2x and C-terminal formats. Serum was prepared from mice immunized with either the R3.2x format (Toxin A: HL821, SEQ ID NO: 9 or Toxin B:HL822, SEQ ID NO: 10), the C-terminal format (Toxin A: HL928, SEQ ID NO: 25 or Toxin B:HL929, SEQ ID NO: 26), Toxoid A or B in Montanide adjuvant (positive control) or buffer (F147) as a negative control. ELISA plates were coated with Toxoid A (FIG. 12A) or Toxoid B (FIG. 12B) (List Biological Laboratories). Serially diluted post-prime serum were then bound and detected with rabbit anti-mouse IgG conjugated to HRP (Jackson Immunoresearch), TMB and H₂SO₄. OD values were converted to specific IgG in μg/mL by comparison to a standard curve of polyclonal mouse IgG (AbD Serotec) fit with a 4-parameter logistic equation (Softmax Pro 5.4).

[0030] FIGS. 13A and 13B depict mouse serum ELISA for C. difficile Toxin/flagellin fusion proteins: post-boost 2: comparison of R3.2x and C-terminal formats. Serum was prepared from mice immunized with either the R3.2x format (Toxin A: referred to as HL821, SEQ ID NO: 9 or Toxin B: referred to as HL822, SEQ ID NO: 10), the C-terminal format (Toxin A: referred to as HL928, SEQ ID NO: 25 or Toxin B: referred to as HL929, SEQ ID NO: 26), Toxoid A or B in Montanide adjuvant (positive control) or buffer (F147) as a negative control. ELISA plates were coated with Toxoid A (FIG. 13A) or Toxoid B (FIG. 13 B) (List Biological Laboratories). Serially diluted post-boost 2 serum from mice were then bound and detected with rabbit anti-mouse IgG conjugated to HRP (Jackson Immunoresearch), TMB and H₂SO₄. OD values were converted to specific IgG in pg/mL by comparison to a standard curve of polyclonal mouse IgG (AbD Serotec) fit with a 4-parameter logistic equation (Softmax Pro 5.4).

[0031] FIGS. 14A, 14B and 14C depict mouse serum neutralization assay for C. difficile Toxin/flagellin fusion proteins: comparison of R3.2x and C-terminal formats. CT26 cells were treated with a cytostatic dose (about 100 ng/mL) of Toxin A (List Biological Laboratories) to block cell growth. After about 72 hours of Toxin A treatment, live cells were quantified using a luciferase assay (Cyto-Glo, Promega) to detect ATP released after cell lysis. Post-boost 2 serum from mice immunized with either R3.2x format (referred to as HL821, SEQ ID NO: 9, FIG. 14A) or C-terminal format (referred to as HL928, SEQ ID NO: 25) Toxin A fusion proteins were diluted 1:100; 1:316.2; 1:1,000 or 1:3,162 and incubated with the Toxin prior to adding to the cells. Serum from mice immunized with Toxoid A in Montanide adjuvant was included as a positive control, and serum from buffer (F147) treated mice served as a negative control. Data are presented as percent growth relative to control cells without Toxin A (100%) and cells with Toxin A, but no serum (0%). Points and lines represent results of individual mice (FIGS. 14A and 14B) or pools (FIG. 14C).

[0032] FIGS. 15A and B depict mouse serum neutralization assays for C. difficile Toxin/flagellin fusion proteins: testing of C-terminal format. CT26 cells were treated with a cytostatic dose (about 100 ng/mL) of Toxin B (List Biological Laboratories) to block cell growth. After about 72 hours of Toxin B treatment, live cells were quantified using a luciferase assay (Cyto-Glo, Promega) to detect ATP released after cell lysis. Post-boost 2 serum from mice immunized with the C-terminal format (referred to as HL929, SEQ ID NO: 26, FIG. 15A) Toxin B fusion protein were diluted 1:100; 1:316.2; 1:1,000; or 1:3,162 and incubated with the Toxin prior to adding to the cells. Pooled serum from mice immunized with Toxoid B in Montanide adjuvant was included as a positive control, and pooled serum from buffer (F147) treated mice served as a negative control (FIG. 15C). Data are presented as percent growth relative to controls cells without Toxin B (100%) and cells with Toxin B but no serum (0%). Points and lines represent results of individual mice (FIG. 15A) or pools (FIG. 15B).

### DETAILED DESCRIPTION OF THE INVENTION

[0033] The features and other details of the invention, either as steps of the invention or as combinations of parts of the invention, will now be more particularly described and pointed out in the claims. It will be understood that the particular embodiments of the invention are shown by way of illustration and not as limitations of the invention. The principle features of this invention can be employed in various embodiments without departing from the scope of the invention.

[0034] The risk of developing clinical disease and the risk of recurrent Clostridium difficile-associated diarrhea are increased in persons who do not mount a sufficient antibody response to toxins of Clostridium difficile bacteria, such as toxin A or toxin B. A threshold of greater than about 3 ELISA Units (EU) of anti-Toxin A IgG differentiated hospital patients who developed asymptomatic Clostridium difficile colonization from those that developed Clostridium difficile-associated diarrhea (Kyne, L., et al., N. Eng. J. Med., 342: 390-397 (2000)). Once infected, individuals who develop strong anti-toxin antibody responses clear their disease following antimicrobial treatment and remain disease free. Low levels of antibodies against toxin B receptor binding domain were related to recurrent disease. Circulating antibodies that neutralize Clostridium difficile toxin may reduce the risk of disease in humans.

[0035] In humans, a Clostridium difficile vaccine candidate is based on formalin-inactivated toxins A and B (toxoids) has been described (Foglia, G., et al. Vaccine, 30: 4307-4309 (2012), Greenberg, R. N., et al. Vaccine, 30: 2245-2249 (2012)). In a reported Phase I study, fifty healthy adult (18-55 years) and 48 elderly (≧65 years) volunteers were randomized to receive the toxoid-based vaccine (2 μg, 10 μg or 50 μg) or placebo on Days 0, 28, and 56. For toxin A, seroconversion by Day 56 (post-dose 2) was observed in 100% of volunteers aged 18-55 years in all dose groups and in 50%, 89%, and 100% of elderly participants in the 2 μg, 10 μg, and 50 μg dose groups, respectively. For both age groups, seroconversion for toxin B was suboptimal and lower than toxin A. Thus, sufficient potency is a concern with use of the toxoid vaccine and leads to the requirement of high doses of the toxoid for Toxin A in the key target population of the elderly. Even high doses are insufficient for Toxin B in the elderly. Additionally, in order to produce the toxins from the native organism, the cytoxicity of the purified toxins must be reduced by several orders of magnitude, typically by chemical inactivation, such as formaldehyde treatment. Large scale production of the highly toxic toxins followed by chemical inactivation is a significant production disadvantage to generate vaccines for Clostridium difficile.

[0036] Strategies to recombinantly produce Clostridium difficile toxins or fragments of the toxins in E. coli, yeast or baculovirus have been explored, but production levels of the toxins in these systems is often low, and/or insufficiently immunogenic unless delivered in combination with an exogenous adjuvant (Donald, R. G. K., et al., Microbiology 159:1254-1266 (2013), Ghose, C., et al., Infect. Immun. 81:2190-2196 (2013); Leuzzi, et al., Infection and Immunity 81:2851-2860 (2013)). For example, fusion of portions of Clostridium difficile antigens, such as the receptor binding domain, to flagellin that lacks domain 2 and domain 3 resulted in relatively low production when expressed recombinantly compared to constructs fused to portions of flagellin referred to as “R3′ constructs” or “R3 constructs” and flagellin that includes domains 2 and 3 (full-length flagellin), as depicted below.

| Construct | Yield |
|---|---|
| R3′.2x | 0.365† |
| STF2R3′f1.RBD-A1 | |
| (HL821, SEQ ID 9) | |
| C-terminal | 0.176† |
| STF2.RBD-A2 | |
| (HL928, SEQ ID 25) | |
| Delta | 0.044† |
| STF2Δ.RBD-A2 | |
| (HL1101, SEQ ID 27) | |
| R3′.2x | 0.139† |
| STF2R3′f1.RBD-B1 | |
| (HL822, SEQ ID 10) | |
| C-terminal | 0.121† |
| STF2.RBD-B2 | |
| (HL929, SEQ ID 26) | |
| Delta | 0.068† |
| STF2Δ.RBD-B2 | |
| (HL1102, SEQ ID 28) | |

†mg protein per gram of cell paste

[0037] The present invention has several advantages over currently available compositions that have production and potency challenges by fusing particular domains of toxin A, toxin B and/or binary toxin of Clostridium difficile to flagellin.

[0038] In a particular embodiment, the invention fuses portions of Clostridium difficile toxin A to the carboxy-terminal amino acid residue of flagellin to generate at least one first fusion protein and fuses portions of Clostridium difficile toxin B to the carboxy-terminal amino acid residue of flagellin to generate at least one second fusion protein. The first and second fusion proteins can be combined to form compositions for use to ameliorate Clostridium difficile associated disease.

[0039] Compositions that include a first fusion protein comprising at least a portion of Clostridium difficile toxin A fused to flagellin, in particular fused to the carboxy-terminal amino acid residue of flagellin or R3 flagellin constructs or R3′ flagellin constructs, and a second fusion protein comprising at least a portion of a Clostridium difficile toxin B fused to flagellin, in particular fused to the carboxy-terminal amino acid residue of flagellin or R3 flagellin constructs or R3′ flagellin constructs, can further include at least one additional fusion protein (a third fusion protein, a fourth fusion protein, a fifth fusion protein) comprising a flagellin, such as an R3 construct of flagellin or an R3′ construct of flagellin, or full length flagellin fused at the carboxy or amino terminus to at least one Clostridium difficile binary toxin antigen.

[0040] Toxins A and B generally have a relatively low pI, such as a pI of less than about 5.0 (about 5.0, about 4.5, about 4.0, about 3.5). The RBD of toxin A, which is a portion of toxin A, has a relatively high pI of greater than about 8.0 (about 8.0, about 8.5, about 9.0, about 9.5, about 10.0, or about 10.5). For example, the f1 fragment of toxin A has a pI of about 8.5 and RBD-A1 has a pI of about 8.5. The GTD of toxin A has a pI of about 5.5 and the CPD of toxin A has a pI of about 5.0. Toxin B antigens can have a relatively low pI of less than about 5.0 (about 5.0, about 4.5, about 4.0, about 3.5, about 3.0). For example, the f1 fragment of toxin B has a pI of about 4.0, the RBD-B2 of toxin B has a pI of about 4.0, the GTD of toxin B has a pI of about 4.5, the CPD of toxin B has a pI of about 4.5 and full length toxin B has a pI of about 4.5. Compositions that include at least one fusion protein having a toxin A antigen, in particular an RBD of toxin A, and at least one fusion protein having a toxin B antigen may result in a composition sufficiently balanced chemically to produce the desired immune response without unwanted side effects from, for example, excess TLR5 signaling from the flagellin component of the fusion protein.

[0041] The pI of the binary toxins vary. The full length cdtA has a pI of about 8.5 and the pI of cdtB has a pI of about 4.50 to about 4.9. Binary toxin antigens for use in the invention can varying depending on the binary toxin. Binary toxin antigens can be a relatively low pI, such as a pI of less than about 5.0 (about 5.0, about 4.5, about 4.0, about 3.5), or a relatively high pI of greater than about 8.0 (about 8.0, about 8.5, about 9.0, about 9.5, about 10.0, or about 10.5).

[0042] In another embodiment, compositions can further include a third fusion protein and a fourth fusion protein comprising a flagellin fused to at least one Clostridium difficile binary toxin. A Clostridium difficile binary toxin consists of two polypeptides, a Ctda polypeptide and a Ctdb polypeptides (FIG. 1C) (Barth, H., et al., Microbiol. Molecular Biol. Reviews 68:373-402 (2004)). The Ctda polypeptide (e.g., SEQ ID NO: 73) contains the ADP-ribosyltransferase (enzymatic domain) domain and a domain which interacts with the Ctdb chain (SEQ ID NO: 74), while the Ctdb polypeptide contains the receptor binding domain, an oligomerization domain, a membrane insertion domain, a Ctda interaction domain and an activation domain (FIG. 1C).

[0043] Binary toxin antigens for use in fusion proteins of the invention can include CdtA; the CdtB binding domain of CdtA; the enzymatic domain of CdtA; a portion or the entirety of CdtB; a portion or the entirety of the receptor binding domain of CdtB; or a portion or the entirety of the transmembrane pore forming domain of CdtB.

[0044] Generally, fusion of antigens to the carboxy-terminal amino acid residue of flagellin can result in a fusion protein that may be immunogenic, but has undesirable side effects, particular at doses sufficient to generate a suitable immune response. However, as described herein, fusion of Clostridium difficile antigens of particular domains of toxin A, toxin B and binary toxin to the carboxy-terminus of flagellin can result in a fusion protein that is sufficiently immunogenic with minimal side effects.

[0045] C. difficile produces two major virulence factors, TcdA and TcdB, which are large (about 270-about 308 kDa, ATCC 43255 strain), single-subunit toxins with multidomain structures that function as glucosyltransferases by inactivating GTPases within eukaryotic target cells. Both toxins are relatively large proteins, about 270-308 kDa, with domains depicted in FIGS. 1A and 1B. Each domain within the toxin corresponds to a function associated with the toxin. The N-terminal domain, which contains glucosyltransferase activity, is referred to as the catalytic or glucosyltransferase domain (GTD); the hydrophobic central region, important for translocating the toxins across the cell membrane, is referred to as the translocation domain (TLD); and the highly repetitive C-terminal domain, which appears to be primarily responsible for receptor binding, is referred to as the receptor binding domain (RBD).

[0046] In the initial step of toxin-mediated pathogenesis, the C-terminal region of TcdA or TcdB interacts with cell surface carbohydrate receptors. More specifically, the C-terminal receptor binding domain (RBD) binds carbohydrates on the surface of colonic epithelial cells as an initial step in pathogenesis. C. difficile toxins then enter the cell through receptor-mediated endocytosis, mediated by the translocation domain (TLD) and disrupt normal signaling pathways necessary for maintaining the cytoskeleton of the cell by the enzymatic domain (glucosyltransferase domain (GTD)), ultimately leading to inflammation and diarrhea.

[0047] The RBD is also called the C-terminal repetitive domain as predicted by sequence analysis and subsequently confirmed by crystal structures (f1) Ho, J. G., et al. PNAS, 20: 102(51): 18373-8 (2005), Greco, A., et al., Nat. Struct. Mol. Biol., 13(5): 460-461 (2006). Two types of repeats appear in both the sequence and the structure of this domain. One is a short repeat (SR) that contains about 15 to about 21 amino acid residues, typically including an amino acid (aa) pattern having a small side chain residue and a hydrophobic amino acid residue, followed by at least 7 hydrophobic amino acid residues and at least 3 aromatic amino acid residues and further followed by a loop of about 8 to about 9 amino acid residues. Examples of short repeats in the RBD are GFKIIDNKTYYYDEDSKLVK (SEQ ID NO: 70), GLININNSLFYFDPIEFNLVT (SEQ ID NO: 71), and GWQTINGKKYYFDINTGAALT (SEQ ID NO: 72), for example, in SEQ ID NOs: 25 and 26 short repeat fragments are shown with a single underline. The other repeat is a long repeat (LR) that includes about 30 amino acid residues, typically has a more conservative amino acid pattern of (Gly-Val-Phe-Xaa-Xaa-Xaa-Xaa-Gly-Phe(Tyr)-Glu-Tyr-Phe (SEQ ID NO:80) and a loop of about 19 amino acid residues. For example, in SEQ ID NOs: 25 and 26 long repeat fragments are shown with a double underline.

[0048] The crystal structure of Toxin A RBD (Ho, J. G., et al., PNAS, 20: 102(51): 18373-18378 (2005)) shows that each SR or LR contains a single β-hairpin consisting of a pair of five- to six-amino acid residue antiparallel β-strands connected by a tight turn (usually type I′) (Ho, J. G., et al., PNAS, 20: 102(51): 18373-18378 (2005). The structure of each β-hairpin is highly conserved, with the residues at positions 2 and 3 of strand 1 and positions 3, 4, and 5 of strand 2 of the first residue of the repeat forming a small hydrophobic cluster that brings consecutive pairs of β-hairpins together in a regularly repeating manner. Hydrophobic packing interactions or hydrogen-bonding interactions between adjacent pairs of β-hairpins dictate the regular arrangement of these secondary structural elements. Specifically, each adjacent pair of β-hairpins is related to the previous β-hairpin by a 3₁ screw-axis transformation, in which adjacent β-hairpins are related by a 120° rotation and a translation of about 10 Å, thus, creating a left-handed β-solenoid helix. This fold is predicted to be found in a wide range of bacterial cell-surface binding proteins and falls in the more general class of repeating solenoid fold proteins (Ho, J. G., et al., PNAS, 20: 102(51): 18373-18378 (2005). One carbohydrate binding site is seen by about 5 to about 7 tandem repeats that includes 1 LR (long term) repeat and several supporting SR (short term) repeats.

[0049] The two carbohydrate-binding sites in the TcdA-f2 structure (Greco, et al., Nat. Struct. Biol. 13:460-461 (2006)) are shallow troughs consisting of a LR and the hairpin turn of the following SR. The high level of sequence conservation in the LRs and key residues of the following SR suggests that the carbohydrate-binding mode seen in TcdA-f2 is conserved in all binding sites of C. difficile toxins. TcdA has about 32 SRs and about 7 LRs (that form 7 binding sites) and TcdB has about 19 SRs and 4LRs (that form 4 binding sites).

[0050] In the initial step of toxin-mediated pathogenesis, the C-terminal region of TcdA or TcdB interacts with cell surface carbohydrate receptors through the binding sites formed by the SRs and LRs of the RBD. The C-terminal and central regions of the toxin help mediate host cell entry by receptor mediated endocytosis. Once internalized, the toxin glucosylates Ras-like GTPases. The N-terminal glucosyltransferase domain (GTD) is a catalytic domain that glucosylates specific threonines in the host intestinal epithelial cells, leading to alterations in the actin cytoskeleton, massive fluid secretion, acute inflammation and necrosis of colonic mucosa. The cysteine protease domain (CPD) is a cellular inositol hexakisphosphate (InsP6) that induces an autocatalytic cleavage of the toxins, releasing the N-terminal glucosyltransferase domain (GTD) into the host cell cytosol. The cysteine protease domain (CPD) is responsible for autoprocessing within toxin.

[0051] These structural domains or portions of domains of Clostridium difficile may be fused to portions or full length flagellin to generate fusion proteins of the invention that can be employed in the methods of the invention. Naturally occurring flagellin has an amino domain 0, an amino domain 1, an amino domain 2, a domain 3, a carboxy domain 2, a carboxy domain and a carboxy domain 0, as depicted, for example, in FIG. 2 (SEQ ID NO: 54).

[0052] The invention is generally directed to fusion proteins that include flagellin and one or more Clostridium difficile antigens, compositions that include fusion proteins of the invention and methods of treating humans with at least one fusion protein that includes at least one flagellin and one or more Clostridium difficile antigens.

[0053] “Fusion protein,” as used herein, refers to a protein that is generated by the joining of two components (also referred to herein as “fused” or linked”) (e.g., flagellin that activates a TLR5 and at least a portion of at least one Clostridium difficile antigen). Fusion proteins of the invention can be generated by recombinant DNA technologies or by chemical conjugation of the components of the fusion protein. Recombinant DNA technologies and chemical conjugation techniques are well established procedures and known to one of skill in the art. Exemplary techniques to generate fusion proteins that include Toll-like Receptor agonists are described herein and in U.S. application Ser. Nos. 11/714,684 and 11/714,873.

[0054] In an embodiment, the invention is a composition comprising a first fusion protein that activates Toll-like Receptor 5 and includes flagellin fused to at least one Clostridium difficile toxin A antigen; and a second fusion protein that activates Toll-like Receptor 5 and includes flagellin fused to at least one Clostridium difficile toxin B antigen. The first fusion protein can include a first Clostridium difficile toxin A antigen that replaces at least a portion of or the entirety of domain 3 of flagellin and a second Clostridium difficile toxin A antigen that is fused to the carboxy-terminal amino acid of flagellin; and the Clostridium difficile toxin B antigen can be fused to the carboxy-terminal amino acid of flagellin of the second fusion protein. In yet another embodiment, the first Clostridium difficile toxin A antigen is at least a portion of a receptor binding domain of Clostridium difficile toxin A and the second Clostridium difficile toxin A antigen is at least a portion, such as an f1 fragment, or the entirety of the receptor binding domain of Clostridium difficile toxin A.

[0055] In a further embodiment, the first fusion protein can include a first Clostridium difficile toxin A antigen that replaces at least a portion of or the entirety of domain 3 of flagellin and a second Clostridium difficile toxin A antigen that is fused to the carboxy-terminal amino acid of flagellin; and the second fusion protein can include a first Clostridium difficile toxin B antigen that replaces at least a portion of or the entirety of domain 3 of flagellin and a second Clostridium difficile toxin B antigen that is fused to the carboxy-terminal amino acid of flagellin. The first Clostridium difficile toxin B antigen can be at least a portion of a receptor binding domain of Clostridium difficile toxin B and the second Clostridium difficile toxin B antigen is at least a portion of an enzymatic domain (a glucosyltransferase domain) of Clostridium difficile toxin B.

[0056] The enzymatic domain of Clostridium difficile toxins can be employed in fusion proteins of the invention. The enzymatic domain of toxin A and toxin B is the glucosyltransferase domain. The enzymatic domain of a binary toxin is the ADP-ribosyltransferase domain.

[0057] In yet another embodiment, the invention is a composition comprising a first fusion protein that activates Toll-like Receptor 5 and includes flagellin fused to at least one Clostridium difficile toxin A antigen; a second fusion protein that activates Toll-like Receptor 5 and includes flagellin fused to at least one Clostridium difficile toxin B antigen; and at least one additional fusion protein (e.g., a third fusion protein and/or a fourth fusion protein) that comprises flagellin fused to at least one Clostridium difficile binary toxin antigen.

[0058] In an embodiment, the invention is a fusion protein comprising a flagellin protein in which domain 3 of the flagellin protein has been replaced with a first Clostridium difficile antigen and a second Clostridium difficile antigen is fused to the carboxy-terminal amino acid of the flagellin protein, wherein the fusion protein activates Toll-like Receptor 5. Flagellin in which domain 3 has been replaced with at least one Clostridium difficile antigen is referred to herein as an “R3 construct,” or Replacement of domain 3 constructs (FIG. 3), or “R3 format.” Flagellin in which domain 3 has been replaced with at least one Clostridium difficile antigen and at least one additional Clostridium difficile antigen has also been fused to the carboxy-terminal amino acid of the flagellin in which domain 3 has been replaced with an antigen is referred to as an “R32x” construct or Replacement of domain 3 constructs with 2 antigens (FIG. 4) or an “R32x format.” The generation of flagellin for R3 constructs and R32x constructs are described, for example, in U.S. Patent Application publication No: 2011/0135680 and WO 2009/128950. R3 constructs and R32x constructs of flagellin can be fused to at least one antigen described herein.

[0059] Portions of flagellin that lack at least a portion of domain 3 are referred to herein as “R3′ constructs” or “R3′ flagellin.” For example, an R3′ construct can be a flagellin in which amino acid residues 194-285 of SEQ ID NO: 81 have been deleted, which results in a portion of flagellin with 3 amino acid residues at the amino-terminal boundary of D3 and 6 amino acid residues at the carboxy-terminal boundary of D3; or amino acid residues 194-337 of SEQ ID NO: 82 have been deleted, which results in a portion of flagellin with 3 amino acid residues at the amino-terminal boundary of D3 and 6 amino acid residues at the carboxy-terminal boundary of D3; or amino acid residues 181-185 of SEQ ID NO: 83 have been deleted, which results in a portion of flagellin with 3 amino acid residues at the amino-terminal boundary of D3 and 6 amino acid residues at the carboxy-terminal boundary of D3. The amino acid residues that remain in domain 3 of flagellin can function as a natural linker for insertion of the Clostridium difficile antigen.

[0060] R3′ constructs of flagellin can be fused to a first Clostridium difficile antigen that replaces the portion of D3 that has been removed from the flagellin to generate R3′ fusion proteins. R3′ constructs of flagellin can be fused to a first Clostridium difficile antigen that replaces the portion of D3 that has been removed from the flagellin and a second Clostridium difficile antigen can be fused to the amino-terminal or carboxy-terminal amino acid of the R3′ construct to generate R3′2x fusion proteins.

[0061] Domains of exemplary flagellins for use in the invention are depicted in Table 1.

TABLE 1
Domains of Exemplary Flagellins for Use
in Fusion Proteins of the Invention

| | SEQ ID | Domain Boundary | | | | | | |
|---|---|---|---|---|---|---|---|---|
| Flagellin | Number | D0N | D1N | D2N | D3 | D2C | D1C | D0C |
| S. | 81 | 1- | 47- | 177- | 191- | 292- | 415- | 465- |
| typhimurium | | 46 | 176 | 190 | 291 | 414 | 464 | 506 |
| flijB | | | | | | | | |
| E. coli | 82 | 1- | 47- | 177- | 191- | 344- | 503- | 553- |
| | | 46 | 176 | 190 | 343 | 502 | 552 | 595 |
| B. subtilis | 83 | 1- | 45- | 171- | 178- | 192- | 236- | 286- |
| | | 44 | 177 | 177 | 191 | 235 | 286 | 317 |

[0062] In an embodiment, the invention is a fusion protein comprising at least one amino acid sequence as set forth in SEQ ID NO: 55 (an R3 construct) and at least a portion of at least one Clostridium difficile antigen, wherein the Clostridium difficile antigen is inserted between amino acid residues 190 and 191 of SEQ ID NO: 55, and wherein the fusion protein activates a Toll-like Receptor 5. Exemplary R3 constructs (also referred to herein as “R3 flagellin constructs” or “R3 form of flagellin”) can be fused to, for example, a Clostridium difficile antigen. In another embodiment, the portion of flagellin employed in fusion proteins and methods of the invention is flagellin lacking domain 3, for example, SEQ ID NO: 55, to which at least one Clostridium difficile antigen is fused at the carboxy-terminus or the amino-terminus of the portion of flagellin lacking domain 3. Exemplary fusion proteins that include an R3 construct include SEQ ID NOs: 13 and 14.

[0063] FIG. 3 depicts the domains (DO, Dl, D2, D3) of a flagellin construct (SEQ ID NO: 55) and a fusion protein that includes, in sequence, the amino-domain 0, the amino-domain 1, the amino-domain 2, the carboxy-domain 2, the carboxy-domain 1 and the carboxy-domain 0 of flagellin. A Clostridium difficile antigen (Ag) is fused between the amino- and carboxy-domain 2 of the flagellin construct. The flagellin construct of the fusion protein depicted in FIG. 3 lacks the D3 domain of flagellin and is referred to herein as an “R3 construct.” An amino acid sequence that activates a TLR5 and has at least about 50.0%, at least about 60.0%, at least about 80.0%, at least about 85.0%, at least about 90.0%, at least about 95.0%, at least about 98.0% and at least about 99.0% identity to the contiguous amino acid sequence as set forth in SEQ ID NO: 55 can be employed in the fusion proteins of the invention.

[0064] In an embodiment, the invention is a fusion protein that activates a Toll-like Receptor 5 that includes an R32x construct of flagellin, and at least two Clostridium difficile antigens. In an embodiment, at least one Clostridium difficile antigen is between amino acid residues 190 and 191 of SEQ ID NO: 54 and at least one other antigen is fused to amino acid residue 405 of SEQ ID NO: 54. Exemplary fusion proteins that include the R32x flagellin construct and Clostridium difficile antigens are SEQ ID NOs: 3, 4, 9 and 10.

[0065] Fusion of a Clostridium difficile antigen to the carboxy-terminus of flagellin, either full length flagellin or a portion of flagellin, such as flagellin lacking domain 3, can be fusion to the terminal (last) amino acid residue of the carboxy-domain 0 of a flagellin or to a terminal amino acid residue of flagellin that has less than the entirety of the carboxy-domain 0. “Less than the entirety,” with reference to a domain of flagellin, means about 60% to about 70% of the total number of amino acid residues that make up domain 0 of the flagellin. For example, with reference to Table 1, less than the entirety of the carboxy-domain 0 of S. typhimurium flijB can be amino acid residues 465-480 or 465-496 or 465-480 of SEQ ID NO: 81; less than the entirety of the carboxy-domain 0 of E. coli flagellin can be amino acid residues 553-565 or 553-575 or 553-585 of SEQ ID NO: 82; and less than the entirety of the carboxy-domain 0 of B. sublitis flagellin can be 286-310 or 286-297 of SEQ ID NO: 83.

[0066] In another embodiment, at least one Clostridium difficile antigen can be fused to the amino-terminus of flagellin. Fusion of at least one Clostridium difficile antigen to the amino-terminus of flagellin, either full length flagellin or a portion of flagellin, such as flagellin lacking domain 3, can be fusion to the terminal (first) amino acid residue of the amino-domain 0 of flagellin or to a first amino acid residue of flagellin that has less than the entirety of the amino-domain 0. For example, with reference to Table 1, less than the entirety of amino-domain 0 of S. typhimurium fljB flagellin can be amino acid residues 1-30, 10-46, or 15-46 of SEQ ID NO: 81; less than the entirety of amino-domain 0 of E. coli flagellin can be amino acid residues 1-30 or 10-46 or 15-46 of SEQ ID NO: 82; and less than the entirety of amino-domain 0 of B. subtilis flagellin can be 1-30 or 10-44 or 15-44 of SEQ ID NO: 83.

[0067] The flagellin in the compositions, fusion proteins and methods described herein can be at least a portion of the S. typhimurium flagellin selected from the group consisting of SEQ ID NO: 54, SEQ ID NO: 55, SEQ ID NO: 81; at least a portion of an S. muenchen flagellin (GenBank Accession Number AB028476) that includes at least a portion of SEQ ID NO: 84 and SEQ ID NO: 85; at least a portion of P. aeruginosa flagellin that includes at least a portion of SEQ ID NO: 86; at least a portion of a Listeria monocytogenes flagellin that includes at least a portion of SEQ ID NO: 87; at least a portion of an E. coli flagellin that includes at least a portion of SEQ ID NO: 88 and SEQ ID NO: 89; at least a portion of a Yersinia flagellin; and at least a portion of a Campylobacter flagellin.

[0068] Fusion proteins of the invention can be made employing routine recombinant molecular biological techniques. The host cells employed to make the fusion proteins of the invention can be a prokaryotic host cell or a eukaryotic host cell. The prokaryotic host cell can be at least one member selected from the group consisting of an E. coli prokaryotic host cell, a Pseudomonas prokaryotic host cell, a Bacillus prokaryotic host cell, a Salmonella prokaryotic host cell and a P. fluorescens prokaryotic host cell.

[0069] Constructs encoding fusion proteins of the invention can be cloned into pET-24a expression vectors. Competent BLR (DE3) E. coli cell lines are transformed and target protein expression is confirmed by SDS-PAGE and Western blot using toxin specific antibodies (Meridian). C-terminal fusion (C-term) constructs partition to the soluble fraction and R3.2x constructs partition into inclusion bodies, regardless of the properties of the vaccine antigen. Fermentation is carried out in shake flasks (1-10L) or bioreactors (≦12L). Expression is induced with 1 mM IPTG. After induction, cells are harvested and lysed using a homogenizer. Soluble protein from constructs is purified by ion exchange and size exclusion chromatography. Insoluble protein from constructs including protein from inclusion bodies is recovered by centrifugation and washed using detergent containing wash buffers to remove endotoxin, nucleic acids and other impurities. Inclusion bodies are re-solubilized in 8M urea and protein refolded by rapid dilution into buffer without urea. Refolded protein is further purified by ion exchange chromatography and size exclusion chromatography. Final protein concentration is determined by the Micro-BCA Kit (Pierce Biotechnology). A target purity of greater than about 90% should be achievable.

[0070] Eukaryotic host cells can be employed to make the fusion proteins of the invention can include a Saccharomyces eukaryotic host cell, an insect eukaryotic host cell (e.g., at least one member selected from the group consisting of a Baculovirus infected insect cell, such as Spodoptera frugiperda (Sf9) or Trichhoplusia ni (High5) cells; and a Drosophila insect cell, such as Dme12 cells), a fungal eukaryotic host cell, a parasite eukaryotic host cell (e.g., a Leishmania tarentolae eukaryotic host cell), CHO cells, yeast cells (e.g., Pichia) and a Kluyveromyces lactis host cell.

[0071] Suitable eukaryotic host cells and vectors can also include plant cells (e.g., tomato; chloroplast; mono- and dicotyledonous plant cells; Arabidopsis thaliana; Hordeum vulgare; Zea mays; potato, such as Solanum tuberosum; carrot, such as Daucus carota L.; and tobacco, such as Nicotiana tabacum, Nicotiana benthamiana (Gils, M., et al., Plant Biotechnol J. 3: 613-20 (2005); He, D. M., et al., Colloids Surf B Biointerfaces, (2006); Huang, Z., et al., Vaccine 19: 2163-71 (2001); Khandelwal, A., et al., Virology, 308: 207-15 (2003); Marquet-Blouin, E., et al., Plant Mol Biol, 51: 459-69 (2003); Sudarshana, M. R., et al. Plant Biotechnol J., 4: 551-9 (2006); Varsani, A., et al., Virus Res, 120: 91-6 (2006); Kamarajugadda S., et al., Expert Rev Vaccines, 5: 839-49 (2006); Koya V, et al., Infect Immun. 73: 8266-74 (2005); Zhang, X., et al., Plant Biotechnol J., 4: 419-32 (2006)).

[0072] A “first Clostridium difficile antigen” or a “second Clostridium difficile antigen,” as used herein, means any portion or the entirety of a Clostridium difficile toxin A, toxin B or a binary toxin antigen. For example, a first or a second Clostridium difficile antigen can be a portion or the entirety of the glucosyltransferase domain, a portion or the entirety of the cysteine protease domain, a portion or the entirety of the translocation domain or a portion or the entirety of the receptor binding domain, or combinations thereof The first and the second Clostridium difficile antigen can be the same or distinct Clostridium difficile antigens. For example, a Clostridium difficile antigen of GTD is distinct from a Clostridium difficile CPD antigen.

[0073] A “portion” of a Clostridium difficile antigen would be less than the entirety of a Clostridium difficile antigen, in particular, a toxin A, toxin B or a binary toxin antigen. The Clostridium difficile antigens can be portions of the GTD (e.g., SEQ ID NOs: 57, 64), CPD (e.g., SEQ ID NOs: 59, 66), TD or RBD (e.g., SEQ ID NOs: 61, 62, 68, 69) domains of the toxin A, B or binary toxin that would be sufficient to generate an antibody response against a Clostridium difficile toxin. In an embodiment the antibody response generated to the Clostridium difficile antigen would neutralize a Clostridium difficile toxin.

[0074] Neutralizing titers in serum can be measured using a cell-based assay. The enzymatic activity of toxin A or B results in changes in cell morpohology and blockage of cell growth. Preincubation of immune serum with toxins allows measurement of neutralizing titers. Monoclonal antibodies CDA1 and CDB1 were found to prevent disease reoccurrence at about 10 to about 100 μg/mL. These antibodies are neutralizing in a cell-based assays at about 15 ng/mL for toxin A and about 45 ng/mL for toxin B. Dividing the clinically effective dose by the neutralizing concentration, titers of 667 to 6,667 for toxin A and 222 to 2,222 for toxin B would be expected to be neutralizing titers of antibody (Lowy, I., et al., N. Engl. J. Med. 362:197-205 (2010), Babcock, G. J., et al., Infect. Immun. 74:6339-6347 (2006)).

[0075] In an embodiment, fusion proteins of the invention that include a toxin A antigen generate a neutralizing antibody titer of at least about 1/600 (about 1/650, about 1/700, about 1/750, about 1/800, about 1/850, about 1/900, about 1/950, about 1/1000). In another embodiment, fusion proteins of the invention that include a toxin B antigen generate a neutralizing antibody titer of at least about 1/200 (about 1/225, about 1/250, about 1/300, about 1/350, about 1/400, about 1/500).

[0076] Neutralizing activity can also be detected in serum using cellular cytotoxicity assays. For example, cells, such as IMR-90 or CT26 cells, are exposed to Toxin A or B for about 18 hours in culture. As a result of the enzymatic activity of the toxins, cell morphology changes from adherent to rounded. This can be scored using a microscope and the toxin concentration at which 50% of the cells are rounded estimated (Babcock, G. J., et al., Infect. Immunol. 74:6339-6347 (2006)). Alternatively, an automated cell scoring system can be employed (Xie, J., et al., Clin. Vaccine Immunol., 20: 517-525 (2013)). Using a fixed amount of toxin, serum from immunized animals can be titrated and an inhibitory mid-points (IC₅₀) determined. Cells can also be incubated with either Toxin A or B for about 48 to about 72 hours resulting in an arrest of cell growth. Live cells can be quantified by measuring ATP with a luciferase assay (Donald, R. G. K., et al., Microbiology 159:1254-1266 (2013)). Addition of a cell lysis agent, luciferase and luciferin results in chemiluminescence proportional to the ATP in live cells. The light can be measured by a 96 well luminescent plate reader. As with the cell rounding assay, with a fixed concentration of toxin, serum from immunized animals can be titrated and an inhibitory mid-points (IC₅₀) determined.

[0077] Portions of flagellin employed in the fusion proteins of the invention can include less than the entirety of a naturally occurring flagellin, such as flagellin that lacks a domain 3, referred to as “R3 constructs” of flagellin depicted in FIG. 3, as described herein.

[0078] In an embodiment, the R3 construct of flagellin is fused to a first Clostridium difficile antigen by replacing domain 3 of flagellin with the first Clostridium difficile antigen, which results in fusion of the Clostridium difficile antigen between the amino domain 2 of flagellin and the carboxyl domain 2 of flagellin.

[0079] “Activates Toll-like Receptor 5 (TLR5)” when referring to a fusion protein of the invention, means that the fusion protein stimulates a response associated with TLR5, for example, host inflammatory responses (Smith, K. D., et al., Nature Immunology 4:1247-1253 (2003)), such as Interleuken-8 (IL-8) production, tumor necrosis factor (TNF) production and NK-κB activation, as described herein. Techniques to assess TLR5 activation are well-established and are described herein. For example, techniques to assess activation of a TLR5 include use of a commercially available cell line, HEK 293 cells, by measuring induction of IL-8 production when the HEK 293 cells are cultured with fusion proteins of the invention. The cultured HEK 293 cells are exposed to fusion proteins of the invention after which the supernatants are evaluated for IL-8 by a commercially available ELISA kit, as described herein.

[0080] The first Clostridium difficile antigen and the second Clostridium difficile antigen of the fusion proteins of the invention can include a Clostridium difficile antigen that is a toxin A antigen, a toxin B antigen, a binary toxin antigen, or any combination thereof. Toxin A and toxin B antigens for use in the fusion proteins described herein, can include at least a portion or the entirety of the glucosyltransferase domain (GTD) (also referred to herein “catalytic domain”), a portion or the entirety of cysteine protease domain (CPD), a portion of the entirety translocation domain (TLD) and a portion of the entirety of a receptor binding domain (RBD).

[0081] The domains of Toxin A of Clostridium difficile (TcdA) are depicted in FIG. 1A. In an embodiment, when a portion or the entirety of the glucosyltransferase domain of Clostridium difficile toxin A or toxin B is employed in the fusion proteins of the invention, the amino acids responsible for the enzymatic activity of the glucosyltransferase domain are inactivated. In particular, the DxD motif of the GTD of toxin A (amino acid residues 2-545 of SEQ ID NO: 15) can have mutations D269N (aspartic acid at position 269 to asparagine) and D285N (aspartic acid at position 285 to asparagine) to yield SEQ ID NO: 57. Likewise, the GTD of toxin B (amino acid residues 2-546 of SEQ ID NO: 16) can have point mutations D270N and D286N to yield SEQ ID NO: 64.

[0082] Exemplary domains of toxin A include the glucosyltransferase domain of amino acid residues 1-545 of SEQ ID NO: 15 (e.g., SEQ ID NO: 56), a cysteine protease domain of amino acid residues 546-808 of SEQ ID NO: 15 (e.g., SEQ ID NO: 58), a translocation domain of amino acid residues 809-1811 of SEQ ID NO: 15 and a receptor binding domain of amino acid residues 1812-2710 of SEQ ID NO: 15 (e.g., SEQ ID NO: 60). The receptor binding domain of a Clostridium difficile toxin, for example, Toxin A, can be further subdivided into a receptor binding domain A1 (RBD-A1), which is a portion of the receptor binding domain, for example, as depicted in FIG. 1A of amino acid residues 2387-2710 of SEQ ID NO: 15 (SEQ ID NO 61). Receptor binding domain A1, includes an additional portion referred to as the “f1 fragment”. The f1 fragment of a Clostridium difficile toxin is a portion of the receptor binding domain that extends to the most carboxy-terminal amino acid residue. An exemplary f1 fragment of toxin A is amino acid residues 2581-2710 of SEQ ID NO: 15 (SEQ ID NO: 90). The crystal structure of the receptor-binding domain C-terminal repeats for Clostridium difficile toxin A has been described, for example, by Ho, J. G. S., et al., PNAS, 102: 18373-18378 (2005). The f1 fragment is highly repetitive.

[0083] A schematic depiction of the glucosyltransferase, cysteine protease, translocation and receptor binding domains of a Clostridium difficile toxin B are depicted in FIG. 1B. Domains of toxins B include, a glucosyltransferase domain of amino acid residues 1-546 of SEQ ID NO: 16 (e.g., SEQ ID NO: 63), a cysteine protease domain of amino acid residues 547-806 of SEQ ID NO: 16 (e.g., SEQ ID NO: 65), a translocation domain of amino acid residues 807-1813 of SEQ ID NO: 16 and a receptor binding domain of amino acid residues 1814-2366 of SEQ ID NO: 16 (e.g., SEQ ID NO: 67). Similar to toxin A, the receptor binding domain of Clostridium difficile toxin B includes a RBD-B l region, which is depicted, for example, as amino acid residues 2005-2366 of SEQ ID NO: 16 (SEQ ID NO: 68). The f1 fragment of an exemplary Clostridium difficile toxin B receptor binding domain is amino acid residues 2221-2366 of SEQ ID NO: 16 (SEQ ID NO: 91).

[0084] In an embodiment, the first Clostridium difficile antigen that replaces domain 3 of the flagellin protein in the fusion proteins of the invention, is a portion of the receptor binding domain of Clostridium difficile toxin A and the second Clostridium difficile antigen that is fused to the carboxy-terminal amino acid of the flagellin protein is a portion or the entirety of the receptor binding domain of Clostridium difficile toxin A. In a particular embodiment, the first Clostridium difficile antigen that replaces domain 3 of the flagellin protein of the fusion protein of the invention, is a portion of a receptor binding domain of Clostridium difficile A, such as an f1 fragment of the RDB (e.g., SEQ ID NO: 91), and the second Clostridium difficile antigen fused to the carboxy-terminal amino acid of the flagellin protein in the fusion proteins of the invention is the entirety of the receptor binding domain of Clostridium difficile toxin A (e.g., SEQ ID NO: 60). In another embodiment, the first Clostridium difficile antigen that replaces domain 3 of the flagellin protein of the fusion protein of the invention, is a portion of a receptor binding domain of Clostridium difficile A, such as an f1 fragment of the RDB (e.g., SEQ ID NO: 62), and the second Clostridium difficile antigen fused to the carboxy-terminal amino acid of the flagellin protein in the fusion proteins of the invention is a portion of the receptor binding domain of Clostridium difficile toxin A (e.g., SEQ ID NO: 61) to yield an R32x fusion protein (SEQ ID NO: 9).

[0085] In another embodiment, the first Clostridium difficile antigen that replaces the domain 3 of a flagellin protein of the fusion proteins of the invention is a Toxin B antigen and the second Clostridium antigen that is fused to the carboxy-terminal amino acid of the flagellin protein and fusion protein is a Clostridium difficile toxin B antigen.

[0086] Fusion proteins that include Clostridium difficile toxin B antigens, can include a first Clostridium difficile antigen that is a portion of a receptor binding domain of Clostridium difficile toxin B antigen that replaces domain 3 of the flagellin protein and the second Clostridium difficile antigen can be a portion or the entirety of the glucosyltransferase domain of the Clostridium difficile toxin B antigen.

[0087] In a particular embodiment, the fusion proteins of the invention include a first Clostridium difficile antigen of toxin B that is a portion of the receptor binding domain of Clostridium difficile toxin B fused to flagellin with a second Clostridium difficile antigen that is the entirety of the glucosyltransferase domain of toxin B fused to the carboxy-terminal amino acid of the fusion protein. In an embodiment, the portion of the first Clostridium difficile antigen that replaces domain 3 of the flagellin protein is an f1 portion of a receptor binding domain of Clostridium difficile toxin B, such as SEQ ID NO: 69 to yield an R32x fusion protein (SEQ ID NO: 10).

[0088] In a further embodiment, the fusion protein of the invention includes a first Clostridium difficile antigen that is a first portion of a receptor binding domain of Clostridium difficile toxin B that replaces domain 3 of a flagellin protein and a second Clostridium difficile antigen is a second portion or the entirety of the receptor binding domain of Clostridium difficile toxin B fused to the carboxy-terminal amino acid of the flagellin protein. In an embodiment, the portion of the receptor binding domain is an f1 portion of the receptor binding domain, such as SEQ ID NO: 69. In another embodiment, the portion of the receptor binding domain of Clostridium difficile toxin B is SEQ ID NO: 67 or SEQ ID NO: 68.

[0089] The first and second portions of the RBD employed in fusion proteins of the invention can be the same portions of the RBD or distinct portions of the RBD.

[0090] In a further embodiment, the first Clostridium difficile antigen that replaces domain 3 of a flagellin protein in the fusion proteins of the invention and the second Clostridium difficile antigen that is fused to the carboxy-terminal amino acid residue of the flagellin protein in which domain 3 has been replaced with the first Clostridium difficile antigen, can include a portion or the entirety of the translocation domain of a Clostridium difficile toxin A or a Clostridium difficile toxin B.

[0091] In yet another embodiment, the first Clostridium difficile antigen that replaces domain 3 of flagellin and the second Clostridium difficile antigen that is fused to the carboxy-terminal amino acid of the flagellin in which domain 3 has been replaced with a first Clostridium difficile antigen can be a portion or the entirety of a Clostridium difficile binary toxin.

[0092] In a further embodiment, fusion proteins of the invention can include a portion or the entirety of any combination of the glucosyltransferase domain, cysteine protease domain, translocation domain and receptor binding domain of a Clostridium difficile toxin A, Clostridium difficile toxin B or Clostridium difficile binary toxin.

[0093] In an embodiment, the fusion proteins of the invention can include a first Clostridium difficile toxin A antigen that replaces domain 3 of flagellin and a second Clostridium difficile toxin B antigen fused to the carboxy-terminal amino acid residue of the flagellin. For example, the f1 domain of the RBD of toxin A can be engineered to replace at least a portion or the entirety of domain 3 of flagellin and the GTD of toxin B can be fused to the carboxy-terminal amino acid of an R3 or R3′ construct.

[0094] In another embodiment, the fusion proteins of the invention can include a first Clostridium difficile toxin B antigen that replaces domain 3 of flagellin and a second Clostridium difficile toxin A antigen fused to the carboxy-terminal amino acid residue of flagellin. For example, an f1 fragment of the RBD domain can be engineered to replace at least a portion of or the entirety D3 in the R3 or R3′ constructs and at least a portion or the entirety of the GTD can be fused to the carboxy-terminal amino acid of the R3 or R3′ construct.

[0095] In a further embodiment, an embodiment of the invention is a fusion protein comprising a full-length flagellin or a portion of flagellin, such as an R3′ construct, fused at the carboxy-terminal amino acid to at least one Clostridium difficile antigen selected from the group consisting of a portion or the entirety of a receptor binding domain of Clostridium difficile, a portion or the entirety of a translocation domain of Clostridium difficile and a portion or the entirety of a glucosyltransferase domain.

[0096] In still another embodiment, the invention is a fusion protein comprising a full length flagellin or a portion of flagellin, such as an R3 construct, fused at the amino-terminal amino acid to at least one Clostridium difficile antigen selected from the group consisting of a portion or the entirety of a receptor binding domain of Clostridium difficile, a portion or the entirety of a translocation domain of Clostridium difficile and a portion of the entirety of a glucosyltransferase domain.

[0097] In an embodiment, the full-length flagellin or portions of flagellin of fusion proteins of the invention, are fused to a portion or the entirety of the receptor binding domain of Clostridium difficile toxin A. In another embodiment, the full-length flagellin or portions of flagellin of the fusion proteins of the invention, are fused, in sequence, to a portion or the entirety of the translocation domain of Clostridium difficile toxin B and a portion or the entirety of the receptor binding domain of Clostridium difficile toxin B. In another embodiment, the full-length flagellin or portions of flagellin of the fusion proteins of the invention are fused to a portion or the entirety of the receptor binding domain of Clostridium difficile toxin B. In yet another embodiment, the full-length flagellin or portions of flagellin of the fusion proteins of the invention are fused to a portion or the entirety of the receptor binding domain of a binary toxin of Clostridium difficile. In a further embodiment, any combination of portions of the domains of Clostridium difficile toxin A, toxin B and binary toxin are fused to full-length flagellin or a portion of flagellin at the carboxy terminus.

[0098] In yet another embodiment, the invention is a fusion protein comprising a portion of flagellin fused at the carboxy-terminal amino acid to at least one Clostridium difficile antigen selected from the group consisting of a portion or the entirety of a receptor binding domain of Clostridium difficile, a portion or the entirety of a translocation domain of Clostridium difficile and a portion or the entirety of a glucosyltransferase domain of Clostridium difficile, wherein the portion of the flagellin is not a portion of flagellin lacking the entirety of amino domain 2, domain 3 and a carboxy domain 2.

[0099] Fusion proteins of the invention, described herein, can be employed in the compositions administered to humans by the methods described herein.

[0100] In yet another embodiment, the invention is a method of treating a human, comprising a step of administering to the human at least one a fusion protein that includes a full-length flagellin protein fused at the carboxy-terminal amino acid to at least one Clostridium difficile antigen selected from the group consisting of a portion or the entirety of a receptor binding domain of Clostridium difficile, a portion or the entirety of a translocation domain of Clostridium difficile and a portion or the entirety of a glucosyltransferase domain. Administration of the composition that includes Clostridium difficile antigen fused to full-length flagellin ameliorates a Clostridium difficile associated disease. For example, amelioration of the Clostridium difficile associated disease can be a consequence of the human generating neutralizing antibodies to at least one of the Clostridium difficile antigen employed and fused to the full-length flagellin.

[0101] “Clostridium difficile associated disease,” as used herein, refers to an interruption, cessation or disorder of a bodily function or system as a consequence of the secretion of toxin by Clostridium difficile bacteria. Primary risk factors for Clostridium difficile associated disease are exposure to antibiotics, exposure to healthcare environment, such as hospitalization, and acid suppressing medications. Clostridium difficile associated disease can include antibiotic associated diarrhea, pseudomembranous colitis which can progress to toxic megacolon that can be life threatening.

[0102] Techniques to assess whether or not a neutralizing antibody has been generated in the human following the administration of a composition that includes fusion proteins of the invention, are well established and known to one of ordinary skill in the art. For example, a mouse model can be used to determine if the immune responses are protective against Clostridium difficile infection, that the antibodies are neutralizing antibodies to Clostridium difficile antigen (Chen, X., et al., Gastroenterology, 135: 1984-1992 (2008)). Aggressive treatment of standard lab mice with a range of antibiotics followed by clindamycin, disturbs the normal gut flora and allows the development of a lethal infection with Clostridium difficile (strain VPI 10463, ATCC 43255) that resembles human disease by both symptoms and histology. Notably, mice that survive initial infection are resistant to reinfection, indicating that the model is suitable for evaluating fusion proteins of the invention.

[0103] Fusion proteins can be assessed for neutralization ability by injection into C57BL/6 mice in a series of doses to generate immune serum. Serum is evaluated for neutralization titers using an in vitro assay described by Babcock et al., Infection and Immunity, 74: 6339-6347 (2006)). Serum is diluted, mixed with purified toxin A or B and incubated for one hour. The mixture is added to cultured IMR-90 or CT26 cells and incubated for an additional 18 to 72 hours. Alternatively, cell viability can be assessed at about 72 hours by measuring ATP released after adding a lysis reagent in the presence of luciferin, as described herein. Cytotoxic activity of the residual toxin A or B can be assessed by microscopic evaluation of cell rounding at 18 hours on a scale of 0-4. The dilution of serum that produces 50% cytotoxicity is the value to compare candidates. Serum from mice immunized with different candidates may be mixed in order to determine if neutralization is additive or synergistic. Optimal doses and interval to achieve high neutralizing titers and the strength of response within 7 days of priming is determined. The serum from these studies is tested in the neutralization assays. Optimal doses and interval to achieve high neutralizing titers is determined. Also strength of response within 7-14 days of the last dose is determined.

[0104] Fusion proteins can be further evaluated by immunizing C57BL/6 mice with a range of doses. Following immunization, mice will be treated with antibiotics and clindamycin, followed by Clostridium difficile challenge. The dose of Clostridium difficile will be an LD₉₀ dose. Mice will be monitored for survival and weight loss, as well as symptoms, such as ruffled fur, diarrhea, and reduced activity. A standard 0-4 symptom scale will be used for the subjective scores.

[0105] In an embodiment, the invention is a method of treating a human comprising the step of administering to the human at least one a fusion protein that activates a Toll-like Receptor 5 and includes a flagellin protein in which domain 3 of the flagellin protein has been replaced with a first Clostridium difficile antigen and a second Clostridium difficile antigen is fused to a carboxy-terminal amino acid of the flagellin protein. Administration of the fusion protein that activates Toll-like Receptor 5 that includes a first Clostridium difficile antigen replacing domain 3 of flagellin and a second Clostridium difficile antigen fused to the most carboxy amino acid of the flagellin, can ameliorate a Clostridium difficile associated disease. Amelioration of disease can be generation of neutralizing antibodies in the human to at least one of the first or the second Clostridium difficile antigen or both the first and second Clostridium difficile antigen.

[0106] In a further embodiment, the invention is a method of treating a human, comprising administering to the human at least one fusion protein that includes a portion of flagellin fused at the carboxy-terminal amino acid to at least one Clostridium difficile antigen selected from the group consisting of a portion or the entirety of a receptor binding domain of Clostridium difficile, and a portion or the entirely of a translocation domain of Clostridium difficile and a portion or the entirety of a glucosyltransferase domain of Clostridium difficile, wherein the portion of the flagellin is not a portion of flagellin lacking all of an amino domain 2, domain 3 and a carboxy domain 2, and whereby administration of the fusion protein ameliorates a Clostridium difficile associated disease. Amelioration of the Clostridium difficile associated disease can be by generating neutralizing antibodies to at least one of the Clostridium difficile antigens.

[0107] In an additional embodiment, the invention is a method of treating a human, comprising administering to the human at least one fusion protein that includes a portion of flagellin fused at the carboxy-terminal amino acid to at least one Clostridium difficile antigen selected from the group consisting of a portion or the entirety of a translocation domain of Clostridium difficile and a portion or the entirety of a glucosyltransferase domain of Clostridium difficile, whereby administration of the fusion protein ameliorates a Clostridium difficile associated disease. In embodiments, the portion of flagellin can be an R3 construct (flagellin lacking a domain 3) or flagellin lacking both domain 2 and domain 3, referred to herein as “STFΔ.”

[0108] In an embodiment, methods of the invention that ameliorate Clostridium difficile associated disease include a composition comprising (1) a fusion protein of flagellin and a Clostridium difficile toxin A antigen as described herein; (2) a fusion protein of flagellin and a Clostridium difficile toxin B antigen as described herein; (3) a fusion protein of flagellin and a Clostridium difficile binary toxin A antigen as described herein; and (4) a fusion protein of flagellin and a Clostridium difficile binary toxin B antigen as described herein.

[0109] The fusion proteins comprising a flagellin and at least one Clostridium difficile antigen can further include a linker between at least one component of the fusion protein (flagellin) and at least one other component of the fusion protein (Clostridium difficile antigen) or any combination thereof. “Linker,” as used herein in reference to a fusion protein, means a connector between components of the fusion protein in a manner that the components are not directly joined. Fusion proteins can include a combination of linkers between distinct components of the fusion protein to similar or like components of the fusion protein. The linker can be an amino acid linker that can includes naturally occurring or synthetic amino acid residues. The amino acid linker can be of varying lengths. In an embodiment, the amino acid linker can include multiple, consecutive glycine residues, such as GGGG (SEQ ID NO: 92) or GGGGG (SEQ ID NO: 93), which are employed in fusion proteins of SEQ ID NOs: 62, 69 or other suitable amino acids that have few or no side chains, including multiple, consecutive serine residues, such as SSSS (SEQ ID NO: 94) or SSSSS (SEQ ID NO: 95), which are considered flexible linkers.

[0110] Exemplary fusion proteins of the invention can include SEQ ID NOs: 1-10, 13, 14, 25, 26, 29 and 30.

[0111] Exemplary fusion proteins that include Clostridium difficile toxin A (TcdA) antigens and Clostridium difficile toxin B (TcdB) antigens are also depicted in FIG. 5. “R3” refers to replacement of domain 3 of flagellin. RDB refers to the receptor binding domain of the Clostridium difficile toxin. GTD refers to the glucosyltransferase domain of the Clostridium difficile toxin. (See FIGS. 1A and 1B). When full length flagellin is employed in the fusion protein “R3” is indicated as none with mutation of “full length flagellin.”

[0112] The human administered fusion proteins of the invention, and the methods described herein, can be a human that is at least 49 years old. In another embodiment, the human administered a fusion protein of the invention can be at least about 50 years old, about 64 years old, at least about 65 years old. In further embodiments, the methods of the invention can employ fusion proteins of the invention to treat a human that is about 1 years old, about 2 years old, about 3 years old, about 4 years old, about 5 years old, or about 6 years old. In an additional embodiment, the human treated by the methods of the invention with the fusion proteins of the invention can be between about 13 years old and about 18 years old. In another embodiment, the human treated by the methods of the invention with the fusion proteins of the invention can be a peripartum woman.

[0113] In a particular embodiment, the Clostridium difficile associated disease that is minimized following administration of fusion proteins of the invention is an antibiotic-associated diarrhea. In another embodiment, the Clostridium difficile associated disease that is minimized following administration of the fusion proteins of the invention is a pseudomembranous colitis.

[0114] The fusion proteins of the invention employed in the methods of the invention can be administered to the human following association with a virosome or a virus-like particle.

[0115] The dose of the fusion protein may be administered to the human within a range of doses including from about 0.1 μg to about 500 μg, 1 μg to about 100 μg, 1 μg to about 50 μg, from about 1 μg to about 30 μg, from about 1 μg to about 25 μg, from about 1 μg to about 20 μg, from about 1 μg to about 15 μg, from about 1 μg to about 10 μg, from about 2 μg to about 50 μg, 2 μg to about 30 μg, from about 2 μg to about 20 μg, from about 2 μg to about 10 μg, from about 2 μg to about 8 μg, from about 3 μg to about 50 μg, 3 μg to about 30 μg, from about 3 μg to about 20 μg, from about 3 μg to about 10 μg, from about 3 μg to about 8 μg, from about 3 μg to about 5 μg, from about 4 μg to about 50 μg, 4 μg to about 30 μg, from about 4 μg to about 20 μg, from about 4 μg to about 10 μg, from about 4 μg to about 8 μg, from about 5 μg to about 50 μg, 5 μg to about 30 μg, from about 5 μg to about 20 μg, from about 5 μg to about 10 μg, from about 5 μg to about 9 μg, and from about 5 μg to about 8 μg.

[0116] In an embodiment, the fusion proteins of the invention employed in the methods of the invention are administered to a human at a dose of at least one member selected from the group consisting of 0.5 μg, 1.0 μg, 1.5 μg, 5 μg, 10 μg, 20 μg, 40 μg and 80 μg.

[0117] The fusion protein for use according to the present invention may be delivered as a standard 0.5 ml injectable dose and contain from about 0.1 μg to about 50 μg of antigen. In a preferred embodiment, the fusion protein for use in the methods of the invention can be a standard 0.5 ml injectable dose and that contains from about 3 μg to about 20 μg of fusion protein in a composition of between about 0.25 and about 1.0 ml, suitably between about 0.5 ml and about 1.0 ml, in particular a standard about 0.5 ml. Low volume doses of compositions that include fusion proteins of the invention can be below about 0.5 ml, typically below about 0.3 ml and usually not less than about 0.1 ml.

[0118] An “effective amount” when referring to the amount of a composition and a fusion protein administered to the human, refers to that amount or dose of the composition that, when administered to the subject is an amount sufficient for therapeutic efficacy (e.g., an amount sufficient to stimulate an immune response in a subject, an amount sufficient to ameliorate Clostridium difficile associated disease).

[0119] The methods of the present invention can be accomplished by the administration of the compositions and fusion proteins of the invention by enteral or parenteral means. Specifically, the route of administration is by intramuscular injection of the composition and fusion protein. Other routes of administration are also encompassed by the present invention including intravenous, intradermal, interarterial, interperitoneal, intranasal, transdermal, suppositories or subcutaneous routes.

[0120] The compositions that include the fusion proteins can be administered alone or as admixtures with conventional excipients, for example, pharmaceutically, or physiologically, acceptable organic, or inorganic carrier substances suitable for enteral or parenteral application which do not deleteriously react with the composition. Suitable pharmaceutically acceptable carriers include water, salt solutions (such as Ringer's solution), alcohols, oils, gelatins and carbohydrates such as lactose, amylose or starch, fatty acid esters, hydroxymethylcellulose, and polyvinyl pyrolidine. Such preparations can be sterilized and, if desired, mixed with auxiliary agents such as lubricants, preservatives, stabilizers, wetting agents, emulsifiers, salts for influencing osmotic pressure, buffers, coloring and/or aromatic substances and the like which do not deleteriously react with the compositions administered to the human.

[0121] The compositions, fusion proteins and proteins of the invention can be administered to a subject on a support that presents the compositions, proteins and fusion proteins of the invention to the immune system of the subject to generate an immune response in the subject. The presentation of the compositions, proteins and fusion proteins of the invention would preferably include exposure of antigenic portions of the fusion protein to generate antibodies. The support is biocompatible. “Biocompatible” as used herein, means that the support does not generate an immune response in the subject (e.g., the production of antibodies).

[0122] The dosage and frequency (single or multiple doses) administered to a subject can vary depending upon a variety of factors, including, for example, prior exposure to an infection consequent to exposure to the antigen: health, body weight, body mass index, and diet of the subject or health-related problems. Other therapeutic regimens or agents can be used in conjunction with the methods and compositions, proteins or polypeptides of the present invention, including the use of adjuvants.

[0123] The composition can be administered to the human in a single dose or in multiple doses, such as at least two doses. When multiple doses are administered to the subject, a second or third dose can be administered days (e.g., 1, 2, 3, 4, 5, 6, 7), weeks (e.g., 1, 2, 3, 4, 5, 6, 7, 8, 9, 10), months (e.g., 1, 2, 3, 4, 5, 6, 7, 8, 9, 10) or years (e.g., 1, 2, 3, 4, 5, 6, 7, 8, 9, 10) after the initial dose. For example, a second dose of the composition can be administered about 7 days, about 14 days or about 28 days following administration of a first dose of the composition that includes the fusion protein.

[0124] Exemplary fusion proteins and Clostridium difficile antigens (also referred to as “C. dif. antigen”) for use in fusion proteins of the invention include: SEQ ID NO: 1, STF2.GTD-A1 (C-terminal fusion with Clostridium difficile Toxin A (TcdA) N-terminal Glucosyltransferase Domain (GTD), D269N+D285N to abolish enzymatic activity; C. diff. antigen is double underlined)

MAQVINTNSLSLLTQNNLNKSQSALGTAIERLSSGLRINSAKDDAAGQAI
ANRFTANIKGLTQASRNANDGISIAQTTEGALNEINNNLQRVRELAVQSA
NSTNSQSDLDSIQAEITQRLNEIDRVSGQTQFNGVKVLAQDNTLTIQVGA
NDGETIDIDLKQINSQTLGLDSLNVQKAYDVKDTAVTTKAYANNGTTLDV
SGLDDAAIKAATGGTNGTASVTGGAVKFDADNNKYFVTIGGFTGADAAKN
GDYEVNVATDGTVTLAAGATKTTMPAGATTKTEVQELKDTPAVVSADAKN
ALIAGGVDATDANGAELVKMSYTDKNGKTIEGGYALKAGDKYYAADYDEA
TGAIKAKTTSYTAADGTTKTAANQLGGVDGKTEVVTIDGKTYNASKAAGH
DFKAQPELAEAAAKTTENPLQKIDAALAQVDALRSDLGAVQNRFNSAITN
LGNTVNNLSEARSRIEDSDYATEVSNMSRAQILQQAGTSVLAQANQVPQN
VLSLLASLISKEELIKLAYSIRPRENEYKTILTNLDEYNKLTTNNNENKY
LQLKKLNESIDVFMNKYKTSSRNRALSNLKKDILKEVILIKNSNTSPVEK
NLHFVWIGGEVSDIALEYIKQWADINAEYNIKLWYDSEAFLVNTLKKAIV
ESSTTEALQLLEEEIQNPQFDNMKFYKKRMEFIYDRQKRFINYYKSQINK
PTVPTIDDIIKSHLVSEYNRDETVLESYRTNSLRKINSNHGIDIRANSLF
TEQELLNIYSQELLNRGNLAAASNIVRLLALKNFGGVYLNVDMLPGIHSD
LFKTISRPSSIGLDRWEMIKLEAIMKYKKYINNYTSENFDKLDQQLKDNF
KLIIESKSEKSEIFSKLENLNVSDLEIKIAFALGSVINQALISKQGSYLT
NLVIEQVKNRYQFLNQHLNPAIESDNNFTDTTKIFHDSLFNSATAENSMF
LTKIAPYLQVGFMPEARSTISLSGPGAYASAYYDFINLQENTIEKTLKAS
DLIEFKFPENNLSQLTEQEINSLWSFDQASAKYQFEKYVRDYTGGSLSED

[0125] SEQ ID NO: 2, STF2.GTD-B1 (C-terminal fusion with Clostridium difficile Toxin B (TcdB) GTD, D270N+D286N to abolish enzymatic activity; C. diff. antigen is double underlined)

MAQVINTNSLSLLTQNNLNKSQSALGTAIERLSSGLRINSAKDDAAGQAI
ANRFTANIKGLTQASRNANDGISIAQTTEGALNEINNNLQRVRELAVQSA
NSTNSQSDLDSIQAEITQRLNEIDRVSGQTQFNGVKVLAQDNTLTIQVGA
NDGETIDIDLKQINSQTLGLDSLNVQKAYDVKDTAVTTKAYANNGTTLDV
SGLDDAAIKAATGGTNGTASVTGGAVKFDADNNKYFVTIGGFTGADAAKN
GDYEVNVATDGTVTLAAGATKTTMPAGATTKTEVQELKDTPAVVSADAKN
ALIAGGVDATDANGAELVKMSYTDKNGKTIEGGYALKAGDKYYAADYDEA
TGAIKAKTTSYTAADGTTKTAANQLGGVDGKTEVVTIDGKTYNASKAAGH
DFKAQPELAEAAAKTTENPLQKIDAALAQVDALRSDLGAVQNRFNSAITN
LGNTVNNLSEARSRIEDSDYATEVSNMSRAQILQQAGTSVLAQANQVPQN
VLSLLASLVNRKQLEKMANVRFRTQEDEYVAILDALEEYHNMSENTVVEK
YLKLKDINSLTDIYIDTYKKSGRNKALKKFKEYLVTEVLELKNNNLTPVE
KNLHFVWIGGQINDTAINYINQWKDVNSDYNVNVFYDSNAFLINTLKKTV
VESAINDTLESFRENLNDPRFDYNKFFRKRMEIIYDKQKNFINYYKAQRE
ENPELIIDDIVKTYLSNEYSKEIDELNTYIEESLNKITQNSGNDVRNFEE
FKNGESFNLYEQELVERWNLAAASNILRISALKEIGGMYLNVDMLPGIQP
DLFESIEKPSSVTVDFWEMTKLEAIMKYKEYIPEYTSEHFDMLDEEVQSS
FESVLASKSDKSEIFSSLGDMEASPLEVKIAFNSKGIINQGLISVKDSYC
SNLIVKQIENRYKILNNSLNPAISEDNDFNTTTNTFIDSIMAEANADNGR
FMMELGKYLRVGFFPDVKTTINLSGPEAYAAAYQDLLMFKEGSMNIHLIE
ADLRNFEISKTNISQSTEQEMASLWSFDDARAKAQFEEYKRNYFEGSLGE
D

[0126] SEQ ID NO: 3, STF2R3′(f1).GTD-A1 (The f1 fragment of TcdA Receptor Binding Domain (RBD) replaced D3 of flagellin with single underlined flexible linkers and C-terminal fusion with TcdA GTD, D269N+D285N to abolish enzymatic activity; C. diff. antigen is double underlined)

MAQVINTNSLSLLTQNNLNKSQSALGTAIERLSSGLRINSAKDDAAGQAI
ANRFTANIKGLTQASRNANDGISIAQTTEGALNEINNNLQRVRELAVQSA
NSTNSQSDLDSIQAEITQRLNEIDRVSGQTQFNGVKVLAQDNTLTIQVGA
NDGETIDIDLKQINSQTLGLDSLNVQKAYDVKDTAVTTKAYANGGGGGNR
YYFEPNTAMGANGYKTIDNKNFYFRNGLPQIGVFKGSNGFEYFAPANTDA
NNIEGQAIRYQNRFLHLLGKIYYFGNNSKAVTGWQTINGKVYYFMPDTAM
AAAGGLFEIDGVIYFFGVDGVKAPGIYGGGGGELKDTPAVVSADAKNALI
AGGVDATDANGAELVKMSYTDKNGKTIEGGYALKAGDKYYAADYDEATGA
IKAKTTSYTAADGTTKTAANQLGGVDGKTEVVTIDGKTYNASKAAGHDFK
AQPELAEAAAKTTENPLQKIDAALAQVDALRSDLGAVQNRFNSAITNLGN
TVNNLSEARSRIEDSDYATEVSNMSRAQILQQAGTSVLAQANQVPQNVLS
LLASLISKEELIKLAYSIRPRENEYKTILTNLDEYNKLTTNNNENKYLQL
KKLNESIDVFMNKYKTSSRNRALSNLKKDILKEVILIKNSNTSPVEKNLH
FVWIGGEVSDIALEYIKQWADINAEYNIKLWYDSEAFLVNTLKKAIVESS
TTEALQLLEEEIQNPQFDNMKFYKKRMEFIYDRQKRFINYYKSQINKPTV
PTIDDIIKSHLVSEYNRDETVLESYRTNSLRKINSNHGIDIRANSLFTEQ
ELLNIYSQELLNRGNLAAASNIVRLLALKNFGGVYLNVDMLPGIHSDLFK
TISRPSSIGLDRWEMIKLEAIMKYKKYINNYTSENFDKLDQQLKDNFKLI
IESKSEKSEIFSKLENLNVSDLEIKIAFALGSVINQALISKQGSYLTNLV
IEQVKNRYQFLNQHLNPAIESDNNFTDTTKIFHDSLFNSATAENSMFLTK
IAPYLQVGFMPEARSTISLSGPGAYASAYYDFINLQENTIEKTLKASDLI
EFKFPENNLSQLTEQEINSLWSFDQASAKYQFEKYVRDYTGGSLSED

[0127] SEQ ID NO: 4, STF2R3′(f1).GTD-B1 (The f1 fragment of TcdB RBD replaced D3 of flagellin with single underlined flexible linkers and C-terminal fusion with TcdA GTD, D270N+D286N to abolish enzymatic activity; C. diff. antigen is double underlined)

MAQVINTNSLSLLTQNNLNKSQSALGTAIERLSSGLRINSAKDDAAGQAI
ANRFTANIKGLTQASRNANDGISIAQTTEGALNEINNNLQRVRELAVQSA
NSTNSQSDLDSIQAEITQRLNEIDRVSGQTQFNGVKVLAQDNTLTIQVGA
NDGETIDIDLKQINSQTLGLDSLNVQKAYDVKDTAVTTKAYANGGGGGKY
YFNPETKKACKGINLIDDIKYYFDEKGIMRTGLISFENNNYYFNENGEMQ
FGYINIEDKMFYFGEDGVMQIGVFNTPDGFKYFAHQNTLDENFEGESINY
TGWLDLDEKRYYFTDEYIAATGSVIIDGEEYYFDPDTAQLVISEGGGGEL
KDTPAVVSADAKNALIAGGVDATDANGAELVKMSYTDKNGKTIEGGYALK
AGDKYYAADYDEATGAIKAKTTSYTAADGTTKTAANQLGGVDGKTEVVTI
DGKTYNASKAAGHDFKAQPELAEAAAKTTENPLQKIDAALAQVDALRSDL
GAVQNRFNSAITNLGNTVNNLSEARSRIEDSDYATEVSNMSRAQILQQAG
TSVLAQANQVPQNVLSLLASLVNRKQLEKMANVRFRTQEDEYVAILDALE
EYHNMSENTVVEKYLKLKDINSLTDIYIDTYKKSGRNKALKKFKEYLVTE
VLELKNNNLTPVEKNLHFVWIGGQINDTAINYINQWKDVNSDYNVNVFYD
SNAFLINTLKKTVVESAINDTLESFRENLNDPRFDYNKFFRKRMEIIYDK
QKNFINYYKAQREENPELIIDDIVKTYLSNEYSKEIDELNTYIEESLNKI
TQNSGNDVRNFEEFKNGESFNLYEQELVERWNLAAASNILRISALKEIGG
MYLNVDMLPGIQPDLFESIEKPSSVTVDFWEMTKLEAIMKYKEYIPEYTS
EHFDMLDEEVQSSFESVLASKSDKSEIFSSLGDMEASPLEVKIAFNSKGI
INQGLISVKDSYCSNLIVKQIENRYKILNNSLNPAISEDNDFNTTTNTFI
DSIMAEANADNGRFMMELGKYLRVGFFPDVKTTINLSGPEAYAAAYQDLL
MFKEGSMNIHLIEADLRNFEISKTNISQSTEQEMASLWSFDDARAKAQFE
EYKRNYFEGSLGED

[0128] SEQ ID NO: 5, STF2.CPD-A1 (C-terminal fusion with TcdA Cysteine Protease Domain (CPD), D589N+H655A+C700S to abolish enzymatic activity; C. diff. antigen is double underlined)

MAQVINTNSLSLLTQNNLNKSQSALGTAIERLSSGLRINSAKDDAAGQAI
ANRFTANIKGLTQASRNANDGISIAQTTEGALNEINNNLQRVRELAVQSA
NSTNSQSDLDSIQAEITQRLNEIDRVSGQTQFNGVKVLAQDNTLTIQVGA
NDGETIDIDLKQINSQTLGLDSLNVQKAYDVKDTAVTTKAYANNGTTLDV
SGLDDAAIKAATGGTNGTASVTGGAVKFDADNNKYFVTIGGFTGADAAKN
GDYEVNVATDGTVTLAAGATKTTMPAGATTKTEVQELKDTPAVVSADAKN
ALIAGGVDATDANGAELVKMSYTDKNGKTIEGGYALKAGDKYYAADYDEA
TGAIKAKTTSYTAADGTTKTAANQLGGVDGKTEVVTIDGKTYNASKAAGH
DFKAQPELAEAAAKTTENPLQKIDAALAQVDALRSDLGAVQNRFNSAITN
LGNTVNNLSEARSRIEDSDYATEVSNMSRAQILQQAGTSVLAQANQVPQN
VLSLLASEDNGVDFNKNTALDKNYLLNNKIPSNNVEEAGSKNYVHYIIQL
QGNDISYEATCNLFSKNPKNSIIIQRNMNESAKSYFLSDDGESILELNKY
RIPERLKNKEKVKVTFIGAGKDEFNTSEFARLSVDSLSNEISSFLDTIKL
DISPKNVEVNLLGSNMFSYDFNVEETYPGKLLLSIMDKITSTLPDVNKNS
ITIGANQYEVRINSEGRKELLAHSGKWINKEEAIMSDLSSKEYIFFDSID
NKLKAKSKNIPGLASISEDIKT

[0129] SEQ ID NO: 6, STF2.CPD-B1 (C-terminal fusion with TcdB Cysteine Protease Domain, D587N+H653A+C698S to abolish enzymatic activity; C. diff. antigen is double underlined)

MAQVINTNSLSLLTQNNLNKSQSALGTAIERLSSGLRINSAKDDAAGQAI
ANRFTANIKGLTQASRNANDGISIAQTTEGALNEINNNLQRVRELAVQSA
NSTNSQSDLDSIQAEITQRLNEIDRVSGQTQFNGVKVLAQDNTLTIQVGA
NDGETIDIDLKQINSQTLGLDSLNVQKAYDVKDTAVTTKAYANNGTTLDV
SGLDDAAIKAATGGTNGTASVTGGAVKFDADNNKYFVTIGGFTGADAAKN
GDYEVNVATDGTVTLAAGATKTTMPAGATTKTEVQELKDTPAVVSADAKN
ALIAGGVDATDANGAELVKMSYTDKNGKTIEGGYALKAGDKYYAADYDEA
TGAIKAKTTSYTAADGTTKTAANQLGGVDGKTEVVTIDGKTYNASKAAGH
DFKAQPELAEAAAKTTENPLQKIDAALAQVDALRSDLGAVQNRFNSAITN
LGNTVNNLSEARSRIEDSDYATEVSNMSRAQILQQAGTSVLAQANQVPQN
VLSLLAGEDDNLDFSQNIVVDKEYLLEKISSLARSSERGYIHYIVQLQGN
KISYEAACNLFAKTPYDSVLFQKNIEDSEIAYYYNPGDGEIQEIDKYKIP
SIISDRPKIKLTFIGAGKDEFNTDIFAGFDVDSLSTEIEAAIDLAKEDIS
PKSIEINLLGSNMFSYSINVEETYPGKLLLKVKDKISELMPSISQDSIIV
SANQYEVRINSEGRRELLDHSGEWINKEESIIKDISSKEYISFNPKENKI
TVKSKNLPELSTLLQEIRN

[0130] SEQ ID NO: 7, STF2R3′(f1).CPD-A1 (The f1 fragment of TcdA RBD replaced D3 of flagellin with single underlined flexible linkers and C-terminal fusion with TcdA CPD, D589N+H655A+C700S to abolish enzymatic activity; C. diff. antigen is double underlined)

MAQVINTNSLSLLTQNNLNKSQSALGTAIERLSSGLRINSAKDDAAGQAI
ANRFTANIKGLTQASRNANDGISIAQTTEGALNEINNNLQRVRELAVQSA
NSTNSQSDLDSIQAEITQRLNEIDRVSGQTQFNGVKVLAQDNTLTIQVGA
NDGETIDIDLKQINSQTLGLDSLNVQKAYDVKDTAVTTKAYANGGGGGNR
YYFEPNTAMGANGYKTIDNKNFYFRNGLPQIGVFKGSNGFEYFAPANTDA
NNIEGQAIRYQNRFLHLLGKIYYFGNNSKAVTGWQTINGKVYYFMPDTAM
AAAGGLFEIDGVIYFFGVDGVKAPGIYGGGGGELKDTPAVVSADAKNALI
AGGVDATDANGAELVKMSYTDKNGKTIEGGYALKAGDKYYAADYDEATGA
IKAKTTSYTAADGTTKTAANQLGGVDGKTEVVTIDGKTYNASKAAGHDFK
AQPELAEAAAKTTENPLQKIDAALAQVDALRSDLGAVQNRFNSAITNLGN
TVNNLSEARSRIEDSDYATEVSNMSRAQILQQAGTSVLAQANQVPQNVLS
LLASEDNGVDFNKNTALDKNYLLNNKIPSNNVEEAGSKNYVHYIIQLQGN
DISYEATCNLFSKNPKNSIIIQRNMNESAKSYFLSDDGESILELNKYRIP
ERLKNKEKVKVTFIGAGKDEFNTSEFARLSVDSLSNEISSFLDTIKLDIS
PKNVEVNLLGSNMFSYDFNVEETYPGKLLLSIMDKITSTLPDVNKNSITI
GANQYEVRINSEGRKELLAHSGKWINKEEAIMSDLSSKEYIFFDSIDNKL
KAKSKNIPGLASISEDIKT

[0131] SEQ ID NO: 8, STF2R3′(f1).CPD-B1 (The f1 fragment of TcdB RBD replaced D3 of flagellin with single underlined flexible linkers and C-terminal fusion with TcdB CPD, D587N+H653A+C698S to abolish enzymatic activity; C. diff. antigen is double underlined)

ANRFTANIKGLTQASRNANDGISIAQTTEGALNEINNNLQRVRELAVQSA
NSTNSQSDLDSIQAEITQRLNEIDRVSGQTQFNGVKVLAQDNTLTIQVGA
NDGETIDIDLKQINSQTLGLDSLNVQKAYDVKDTAVTTKAYANGGGGGKY
YFNPETKKACKGINLIDDIKYYFDEKGIMRTGLISFENNNYYFNENGEMQ
FGYINIEDKMFYFGEDGVMQIGVFNTPDGFKYFAHQNTLDENFEGESINY
TGWLDLDEKRYYFTDEYIAATGSVIIDGEEYYFDPDTAQLVISEGGGGEL
KDTPAVVSADAKNALIAGGVDATDANGAELVKMSYTDKNGKTIEGGYALK
AGDKYYAADYDEATGAIKAKTTSYTAADGTTKTAANQLGGVDGKTEVVTI
DGKTYNASKAAGHDFKAQPELAEAAAKTTENPLQKIDAALAQVDALRSDL
GAVQNRFNSAITNLGNTVNNLSEARSRIEDSDYATEVSNMSRAQILQQAG
TSVLAQANQVPQNVLSLLAGEDDNLDFSQNIVVDKEYLLEKISSLARSSE
RGYIHYIVQLQGNKISYEAACNLFAKTPYDSVLFQKNIEDSEIAYYYNPG
DGEIQEIDKYKIPSIISDRPKIKLTFIGAGKDEFNTDIFAGFDVDSLSTE
IEAAIDLAKEDISPKSIEINLLGSNMFSYSINVEETYPGKLLLKVKDKIS
ELMPSISQDSIIVSANQYEVRINSEGRRELLDHSGEWINKEESIIKDISS
KEYISFNPKENKITVKSKNLPELSTLLQEIRN

[0132] SEQ ID NO: 9, HL821, STF2R3′(f1).RBD-A1 (The f1 fragment of TcdA Receptor Binding Domain (RBD) replaced D3 of flagellin with single underlined flexible linkers and C-terminal fusion with 14 repeats of the C-terminal TcdA of C. diff. antigen is double underlined)

MAQVINTNSLSLLTQNNLNKSQSALGTAIERLSSGLRINSAKDDAAGQAI
ANRFTANIKGLTQASRNANDGISIAQTTEGALNEINNNLQRVRELAVQSA
NSTNSQSDLDSIQAEITQRLNEIDRVSGQTQFNGVKVLAQDNTLTIQVGA
NDGETIDIDLKQINSQTLGLDSLNVQKAYDVKDTAVTTKAYANGGGGGNR
YYFEPNTAMGANGYKTIDNKNFYFRNGLPQIGVFKGSNGFEYFAPANTDA
NNIEGQAIRYQNRFLHLLGKIYYFGNNSKAVTGWQTINGKVYYFMPDTAM
AAAGGLFEIDGVIYFFGVDGVKAPGIYGGGGGELKDTPAVVSADAKNALI
AGGVDATDANGAELVKMSYTDKNGKTIEGGYALKAGDKYYAADYDEATGA
IKAKTTSYTAADGTTKTAANQLGGVDGKTEVVTIDGKTYNASKAAGHDFK
AQPELAEAAAKTTENPLQKIDAALAQVDALRSDLGAVQNRFNSAITNLGN
TVNNLSEARSRIEDSDYATEVSNMSRAQILQQAGTSVLAQANQVPQNVLS
LLAASTGYTSINGKHFYFNTDGIMQIGVFKGPNGFEYFAPANTDANNIEG
QAILYQNKFLTLNGKKYYFGSDSKAVTGLRTIDGKKYYFNTNTAVAVTGW
QTINGKKYYFNTNTSIASTGYTIISGKHFYFNTDGIMQIGVFKGPDGFEY
FAPANTDANNIEGQAIRYQNRFLYLHDNIYYFGNNSKAATGWVTIDGNRY
YFEPNTAMGANGYKTIDNKNFYFRNGLPQIGVFKGSNGFEYFAPANTDAN
NIEGQAIRYQNRFLHLLGKIYYFGNNSKAVTGWQTINGKVYYFMPDTAMA
AAGGLFEIDGVIYFFGVDGVKAPG

[0133] SEQ ID NO: 10, HL822, STF2R3′(f1).RBD-B1 (The f1 fragment of TcdB RBD replaced D3 of flagellin with single underlined flexible linkers and C-terminal fusion with 16 repeats of the C-terminal TcdB of C. diff. antigen is double underlined)

MAQVINTNSLSLLTQNNLNKSQSALGTAIERLSSGLRINSAKDDAAGQAI
ANRFTANIKGLTQASRNANDGISIAQTTEGALNEINNNLQRVRELAVQSA
NSTNSQSDLDSIQAEITQRLNEIDRVSGQTQFNGVKVLAQDNTLTIQVGA
NDGETIDIDLKQINSQTLGLDSLNVQKAYDVKDTAVTTKAYANGGGGGKY
YFNPETKKACKGINLIDDIKYYFDEKGIMRTGLISFENNNYYFNENGEMQ
FGYINIEDKMFYFGEDGVMQIGVFNTPDGFKYFAHQNTLDENFEGESINY
TGWLDLDEKRYYFTDEYIAATGSVIIDGEEYYFDPDTAQLVISEGGGGEL
KDTPAVVSADAKNALIAGGVDATDANGAELVKMSYTDKNGKTIEGGYALK
AGDKYYAADYDEATGAIKAKTTSYTAADGTTKTAANQLGGVDGKTEVVTI
DGKTYNASKAAGHDFKAQPELAEAAAKTTENPLQKIDAALAQVDALRSDL
GAVQNRFNSAITNLGNTVNNLSEARSRIEDSDYATEVSNMSRAQILQQAG
TSVLAQANQVPQNVLSLLAMKVGYTEIDGKHFYFAENGEMQIGVFNTEDG
FKYFAHHNEDLGNEEGEEISYSGILNFNNKIYYFDDSFTAVVGWKDLEDG
SKYYFDEDTAEAYIGLSLINDGQYYFNDDGIMQVGFVTINDKVFYFSDSG
IIESGVQNIDDNYFYIDDNGIVQIGVFDTSDGYKYFAPANTVNDNIYGQA
VEYSGLVRVGEDVYYFGETYTIETGWIYDMENESDKYYFNPETKKACKGI
NLIDDIKYYFDEKGIMRTGLISFENNNYYFNENGEMQFGYINIEDKMFYF
GEDGVMQIGVFNTPDGFKYFAHQNTLDENFEGESINYTGWLDLDEKRYYF
TDEYIAATGSVIIDGEEYYFDPDTAQLVISE

[0134] SEQ ID NO: 11, STF2R3′(f1).RBD-A2 (The f1 fragment of TcdA RBD replaced D3 of flagellin with single underlined flexible linkers and C-terminal fusion with full receptor binding domain with residues 1812-2710 of TcdA; 40 repeats of C. diff. antigen in italics. Note: Single underline, short repeat; double underline, long repeat)

MAQVINTNSLSLLTQNNLNKSQSALGTAIERLSSGLRINSAKDDAAGQAI
ANRFTANIKGLTQASRNANDGISIAQTTEGALNEINNNLQRVRELAVQSA
NSTNSQSDLDSIQAEITQRLNEIDRVSGQTQFNGVKVLAQDNTLTIQVGA
NDGETIDIDLKQINSQTLGLDSLNVQKAYDVKDTAVTTKAYANGGGGGNR
YYFEPNTAMGANGYKTIDNKNFYFRNGLPQIGVFKGSNGFEYFAPANTDA
NNIEGQAIRYQNRFLHLLGKIYYFGNNSKAVTGWQTINGKVYYFMPDTAM
AAAGGLFEIDGVIYFFGVDGVKAPGIYGGGGGELKDTPAVVSADAKNALI
AGGVDATDANGAELVKMSYTDKNGKTIEGGYALKAGDKYYAADYDEATGA
IKAKTTSYTAADGTTKTAANQLGGVDGKTEVVTIDGKTYNASKAAGHDFK
AQPELAEAAAKTTENPLQKIDAALAQVDALRSDLGAVQNRFNSAITNLGN
TVNNLSEARSRIEDSDYATEVSNMSRAQILQQAGTSVLAQANQVPQNVLS
LLAGFKIIDNKTYYYDEDSKLVKGLININNSLFYFDPIEFNLVTGWQTIN
GKKYYFDINTGAALTSYKIINGKHFYFNNDGVMQLGVFKGPDGFEYFAPA
NTQNNNIEGQAIVYQSKFLTLNGKKYYFDNNSKAVTGWRIINNEKYYFNP
NNAIAAVGLQVIDNNKYYFNPDTAIISKGWQTVNGSRYYFDTPTAIAFNG
YKTIDGKHFYFDSDCVVKIGVFSTSNGFEYFAPANTYNNNIEGQAIVYQS
KFLTLNGKKYYFDNNSKAVTGWQTIDSKKYYFNTNTAEAATGWQTIDGKK
YYFNTNTAEAATGWQTIDGKKYYFNTNTAIASTGYTIINGKHFYFNTDGI
MQIGVFKGPNGFEYFAPANTDANNIEGQAILYQNEFLTLNGKKYYFGSDS
KAVTGWRIINNKKYYFNPNNAIAAIHLCTINNDKYYFSYDGILQNGYITI
ERNNFYFDANNESKMVTGVFKGPNGFEYFAPANTHNNNIEGQAIVYQNKF
LTLNGKKYYFDNDSKAVTGWQTIDGKKYYFNLNTAEAATGWQTIDGKKYY
FNLNTAEAATGWQTIDGKKYYFNTNTFIASTGYTSINGKHFYFNTDGIMQ
IGVFKGPNGFEYFAPANTDANNIEGQAILYQNKFLTLNGKKYYFGSDSKA
VTGLRTIDGKKYYFNTNTAVAVTGWQTINGKKYYFNTNTSIASTGYTIIS
GKHFYFNTDGIMQIGVFKGPDGFEYFAPANTDANNIEGQAIRYQNRFLYL
HDNIYYFGNNSKAATGWVTIDGNRYYFEPNTAMGANGYKTIDNKNFYFRN
GLPQIGVFKGSNGFEYFAPANTDANNIEGQAIRYQNRFLHLLGKIYYFGN
NSKAVTGWQTINGKVYYFMPDTAMAAAGGLFEIDGVIYFFGVDGVKAPGI
YG

[0135] SEQ ID NO: 12, STF2R3′(f1).RBD-B2 (The f1 fragment of TcdB RBD replaced D3 of flagellin with single underlined flexible linkers and C-terminal fusion with TcdB, full receptor binding residues 1814-2366, 24 repeats of C. diff. antigen in italics. Note: Single underline, short repeat; double underline, long repeat)

MAQVINTNSLSLLTQNNLNKSQSALGTAIERLSSGLRINSAKDDAAGQAI
ANRFTANIKGLTQASRNANDGISIAQTTEGALNEINNNLQRVRELAVQSA
NSTNSQSDLDSIQAEITQRLNEIDRVSGQTQFNGVKVLAQDNTLTIQVGA
NDGETIDIDLKQINSQTLGLDSLNVQKAYDVKDTAVTTKAYANGGGGGKY
YFNPETKKACKGINLIDDIKYYFDEKGIMRTGLISFENNNYYFNENGEMQ
FGYINIEDKMFYFGEDGVMQIGVFNTPDGFKYFAHQNTLDENFEGESINY
TGWLDLDEKRYYFTDEYIAATGSVIIDGEEYYFDPDTAQLVISEGGGGEL
KDTPAVVSADAKNALIAGGVDATDANGAELVKMSYTDKNGKTIEGGYALK
AGDKYYAADYDEATGAIKAKTTSYTAADGTTKTAANQLGGVDGKTEVVTI
DGKTYNASKAAGHDFKAQPELAEAAAKTTENPLQKIDAALAQVDALRSDL
GAVQNRFNSAITNLGNTVNNLSEARSRIEDSDYATEVSNMSRAQILQQAG
TSVLAQANQVPQNVLSLLAGLVSLYNEKFYINNFGMMVSGLIYINDSLYY
FKPPVNNLITGFVTVGDDKYYFNPINGGAASIGETIIDDKNYYFNQSGVL
QTGVFSTEDGFKYFAPANTLDENLEGEAIDFTGKLIIDENIYYFDDNYRG
AVEWKELDGEMHYFSPETGKAFKGLNQIGDYKYYFNSDGVMQKGFVSIND
NKHYFDDSGVMKVGYTEIDGKHFYFAENGEMQIGVFNTEDGFKYFAHHNE
DLGNEEGEEISYSGILNFNNKIYYFDDSFTAVVGWKDLEDGSKYYFDEDT
AEAYIGLSLINDGQYYFNDDGIMQVGFVTINDKVFYFSDSGIIESGVQNI
DDNYFYIDDNGIVQIGVFDTSDGYKYFAPANTVNDNIYGQAVEYSGLVRV
GEDVYYFGETYTIETGWIYDMENESDKYYFNPETKKACKGINLIDDIKYY
FDEKGIMRTGLISFENNNYYFNENGEMQFGYINIEDKMFYFGEDGVMQIG
VFNTPDGFKYFAHQNTLDENFEGESINYTGWLDLDEKRYYFTDEYIAATG
SVIIDGEEYYFDPDTAQLVISE

[0136] SEQ ID NO: 13, STF2R3′(2xRBD-A). (Double full length RBDs connected by flexible linkers replaced D3 of flagellin. TcdA, full receptor binding domain, residues 1812-2710 of C. diff. antigen in italics. Note: Single underline, short repeat; double underline, long repeat)

MAQVINTNSLSLLTQNNLNKSQSALGTAIERLSSGLRINSAKDDAAGQAI
ANRFTANIKGLTQASRNANDGISIAQTTEGALNEINNNLQRVRELAVQSA
NSTNSQSDLDSIQAEITQRLNEIDRVSGQTQFNGVKVLAQDNTLTIQVGA
NDGETIDIDLKQINSQTLGLDSLNVQKAYDVKDTAVTTKAYANGGGGFKI
IDNKTYYYDEDSKLVKGLININNSLFYDPIEFNLVTGWQTINGKKYYFD
INTGAALTSYKIINGKHFYFNNDGVMQLGVFKGPDGFEYFAPANTQNNNI
EGQAIVYQSKFLTLNGKKYYFDNNSKAVTGWRIINNEKYYFNPNNAIAAV
GLQVIDNNKYYFNPDTAIISKGWQTVNGSRYYFDTDTAIAFNGYKTIDGK
HFYFDSDCVVKIGVFSTSNGFEYFAPANTYNNNIEGQAIVYQSKFLTLNG
KKYYFDNNSKAVTGWQTIDSKKYYFNTNTAEAATGWQTIDGKKYYFNTNT
AEAATGWQTIDGKKYYFNTNTAIASTGYTIINGKHFYFNTDGIMQIGVFK
GPNGFEYFAPANTDANNIEGQAILYQNEFLTLNGKKYYFGSDSKAVTGWR
IINNKKYYFNPNNAIAAIHLCTINNDKYYFSYDGILQNGYITIERNNFYF
DANNESKMVTGVFKGPNGFEYFAPANTHNNNIEGQAIVYQNKFLTLNGKK
YYFDNDSKAVTGWQTIDGKKYYFNLNTAEAATGWQTIDGKKYYFNLNTAE
AATGWQTIDGKKYYFNTNTFIASTGYTSINGKHFYFNTDGIMQIGVFKGP
NGFEYFAPANTDANNIEGQAILYQNKFLTLNGKKYYFGSDSKAVTGLRTI
DGKKYYFNTNTAVAVTGWQTINGKKYYFNTNTSIASTGYTIISGKHFYFN
TDGIMQIGVFKGPDGFEYFAPANTDANNIEGQAIRYQNRFLYLHDNIYYF
GNNSKAATGWVTIDGNRYYFEPNTAMGANGYKTIDNKNFYFRNGLPQIGV
FKGSNGFEYFAPANTDANNIEGQAIRYQNRFLHLLGKIYYFGNNSKAVTG
WQTINGKVYYFMPDTAMAAAGGLFEIDGVIYFFGVDGVKAPGIYGGGGGF
KIIDNKTYYYDEDSKLVKGLININNSLFYFDPIEFNLVTGWQTINGKKYY
FDINTGAALTSYKIINGKHFYFNNDGVMQLGVFKGPDGFEYFAPANTQNN
NIEGQAIVYQSKFLTLNGKKYYFDNNSKAVTGWRIINNEKYYFNPNNAIA
AVGLQVIDNNKYYFNPDTAIISKGWQTVNGSRYYFDTDTAIAFNGYKTID
GKHFYFDSDCVVKIGVFSTSNGFEYFAPANTYNNNIEGQAIVYQSKFLTL
NGKKYYFDNNSKAVTGWQTIDSKKYYFNTNTAEAATGWQTIDGKKYYFNT
NTAEAATGWQTIDGKKYYFNTNTAIASTGYTIINGKHFYFNTDGIMQIGV
FKGPNGFEYFAPANTDANNIEGQAILYQNEFLTLNGKKYYFGSDSKAVTG
WRIINNKKYYFNPNNAIAAIHLCTINNDKYYFSYDGILQNGYITIERNNF
YFDANNESKMVTGVFKGPNGFEYFAPANTHNNNIEGQAIVYQNKFLTLNG
KKYYFDNDSKAVTGWQTIDGKKYYFNLNTAEAATGWQTIDGKKYYFNLNT
AEAATGWQTIDGKKYYFNTNTFIASTGYTSINGKHFYFNTDGIMQIGVFK
GPNGFEYFAPANTDANNIEGQAILYQNKFLTLNGKKYYFGSDSKAVTGLR
TIDGKKYYFNTNTAVAVTGWQTINGKKYYFNTNTSIASTGYTIISGKHFY
FNTDGIMQIGVFKGPDGFEYFAPANTDANNIEGQAIRYQNRFLYLHDNIY
YFGNNSKAATGWVTIDGNRYYFEPNTAMGANGYKTIDNKNFYFRNGLPQI
GVFKGSNGFEYFAPANTDANNIEGQAIRYQNRFLHLLGKIYYFGNNSKAV
TGWQTINGKVYYFMPDTAMAAAGGLFEIDGVIYFFGVDGVKAPGIYGGGG
ELKDTPAVVSADAKNALIAGGVDATDANGAELVKMSYTDKNGKTIEGGYA
LKAGDKYYAADYDEATGAIKAKTTSYTAADGTTKTAANQLGGVDGKTEVV
TIDGKTYNASKAAGHDFKAQPELAEAAAKTTENPLQKIDAALAQVDALRS
DLGAVQNRFNSAITNLGNTVNNLSEARSRIEDSDYATEVSNMSRAQILQQ
AGTSVLAQANQVPQNVLSLLA

[0137] SEQ ID NO: 14, STF2R3′(2xRBD-B). (Double full length RBDs connected by flexible linkers replaced D3 of flagellin. TcdB, full receptor binding double repeat of residues 1814-2366 in italics. Note: Single underline, short repeat; double underline, long repeat)

MAQVINTNSLSLLTQNNLNKSQSALGTAIERLSSGLRINSAKDDAAGQAI
ANRFTANIKGLTQASRNANDGISIAQTTEGALNEINNNLQRVRELAVQSA
NSTNSQSDLDSIQAEITQRLNEIDRVSGQTQFNGVKVLAQDNTLTIQVGA
NDGETIDIDLKQINSQTLGLDSLNVQKAYDVKDTAVTTKAYANGGGLVSL
YNEKFYINNFGMMVSGLIYINDSLYYFKPPVNNLITGFVTVGDDKYYFNP
INGGAASIGETIIDDKNYYFNQSGVLQTGVFSTEDGFKYFAPANTLDENL
EGEAIDFTGKLIIDENIYYFDDNYRGAVEWKELDGEMHYFSPETGKAFKG
LNQIGDYKYYFNSDGVMQKGFVSINDNKHYFDDSGVMKVGYTEIDGKHFY
FAENGEMQIGVFNTEDGFKYFAHHNEDLGNEEGEEISYSGILNFNNKIYY
FDDSFTAVVGWKDLEDGSKYYFDEDTAEAYIGLSLINDGQYYFNDDGIMQ
VGFVTINDKVFYFSDSGIIESGVQNIDDNYFYIDDNGIVQIGVFDTSDGY
KYFAPANTVNDNIYGQAVEYSGLVRVGEDVYYFGETYTIETGWIYDMENE
SDKYYFNPETKKACKGINLIDDIKYYFDEKGIMRTGLISFENNNYYFNEN
GEMQFGYINIEDKMFYFGEDGVMQIGVFNTPDGFKYFAHQNTLDENFEGE
SINYTGWLDLDEKRYYFTDEYIAATGSVIIDGEEYYFDPDTAQLVISEGG
GGGLVSLYNEKFYINNFGMMVSGLIYINDSLYYFKPPVNNLITGFVTVGD
DKYYFNPINGGAASIGETIIDDKNYYFNQSGVLQTGVFSTEDGFKYFAPA
NTLDENLEGEAIDFTGKLIIDENIYYFDDNYRGAVEWKELDGEMHYFSPE
TGKAFKGLNQIGDYKYYFNSDGVMQKGFVSINDNKHYFDDSGVMKVGYTE
IDGKHFYFAENGEMQIGVFNTEDGFKYFAHHNEDLGNEEGEEISYSGILN
FNNKIYYFDDSFTAVVGWKDLEDGSKYYFDEDTAEAYIGLSLINDGQYYF
NDDGIMQVGFVTINDKVFYFSDSGIIESGVQNIDDNYFYIDDNGIVQIGV
FDTSDGYKYFAPANTVNDNIYGQAVEYSGLVRVGEDVYYFGETYTIETGW
IYDMENESDKYYFNPETKKACKGINLIDDIKYYFDEKGIMRTGLISFENN
NYYFNENGEMQFGYINIEDKMFYFGEDGVMQIGVFNTPDGFKYFAHQNTL
DENFEGESINYTGWLDLDEKRYYFTDEYIAATGSVIIDGEEYYFDPDTAQ
LVISEGGGELKDTPAVVSADAKNALIAGGVDATDANGAELVKMSYTDKNG
KTIEGGYALKAGDKYYAADYDEATGAIKAKTTSYTAADGTTKTAANQLGG
VDGKTEVVTIDGKTYNASKAAGHDFKAQPELAEAAAKTTENPLQKIDAAL
AQVDALRSDLGAVQNRFNSAITNLGNTVNNLSEARSRIEDSDYATEVSNM
SRAQILQQAGTSVLAQANQVPQNVLSLLA

[0138] SEQ ID NO: 17, STF2.GTD-A2 (C-terminal fusion with TcdA GTD, D269A+R272A+Y283A+D285A+D287A to abolish enzymatic activity; C. diff. antigen is double underlined)

MAQVINTNSLSLLTQNNLNKSQSALGTAIERLSSGLRINSAKDDAAGQAI
ANRFTANIKGLTQASRNANDGISIAQTTEGALNEINNNLQRVRELAVQSA
NSTNSQSDLDSIQAEITQRLNEIDRVSGQTQFNGVKVLAQDNTLTIQVGA
NDGETIDIDLKQINSQTLGLDSLNVQKAYDVKDTAVTTKAYANNGTTLDV
SGLDDAAIKAATGGTNGTASVTGGAVKFDADNNKYFVTIGGFTGADAAKN
GDYEVNVATDGTVTLAAGATKTTMPAGATTKTEVQELKDTPAVVSADAKN
ALIAGGVDATDANGAELVKMSYTDKNGKTIEGGYALKAGDKYYAADYDEA
TGAIKAKTTSYTAADGTTKTAANQLGGVDGKTEVVTIDGKTYNASKAAGH
DFKAQPELAEAAAKTTENPLQKIDAALAQVDALRSDLGAVQNRFNSAITN
LGNTVNNLSEARSRIEDSDYATEVSNMSRAQILQQAGTSVLAQANQVPQN
VLSLLASLISKEELIKLAYSIRPRENEYKTILTNLDEYNKLTTNNNENKY
LQLKKLNESIDVFMNKYKTSSRNRALSNLKKDILKEVILIKNSNTSPVEK
NLHFVWIGGEVSDIALEYIKQWADINAEYNIKLWYDSEAFLVNTLKKAIV
ESSTTEALQLLEEEIQNPQFDNMKFYKKRMEFIYDRQKRFINYYKSQINK
PTVPTIDDIIKSHLVSEYNRDETVLESYRTNSLRKINSNHGIDIRANSLF
TEQELLNIYSQELLNRGNLAAASAIVALLALKNFGGVALAVAMLPGIHSD
LFKTISRPSSIGLDRWEMIKLEAIMKYKKYINNYTSENFDKLDQQLKDNF
KLIIESKSEKSEIFSKLENLNVSDLEIKIAFALGSVINQALISKQGSYLT
NLVIEQVKNRYQFLNQHLNPAIESDNNFTDTTKIFHDSLFNSATAENSMF
LTKIAPYLQVGFMPEARSTISLSGPGAYASAYYDFINLQENTIEKTLKAS
DLIEFKFPENNLSQLTEQEINSLWSFDQASAKYQFEKYVRDYTGGSLSED

[0139] SEQ ID NO: 18, STF2.GTD-B2 (C-terminal fusion with TcdB GTD, D270A+R273A+Y284A+D286A+D288A to abolish enzymatic activity; C. diff. antigen is double underlined)

MAQVINTNSLSLLTQNNLNKSQSALGTAIERLSSGLRINSAKDDAAGQAI
ANRFTANIKGLTQASRNANDGISIAQTTEGALNEINNNLQRVRELAVQSA
NSTNSQSDLDSIQAEITQRLNEIDRVSGQTQFNGVKVLAQDNTLTIQVGA
NDGETIDIDLKQINSQTLGLDSLNVQKAYDVKDTAVTTKAYANNGTTLDV
SGLDDAAIKAATGGTNGTASVTGGAVKFDADNNKYFVTIGGFTGADAAKN
GDYEVNVATDGTVTLAAGATKTTMPAGATTKTEVQELKDTPAVVSADAKN
ALIAGGVDATDANGAELVKMSYTDKNGKTIEGGYALKAGDKYYAADYDEA
TGAIKAKTTSYTAADGTTKTAANQLGGVDGKTEVVTIDGKTYNASKAAGH
DFKAQPELAEAAAKTTENPLQKIDAALAQVDALRSDLGAVQNRFNSAITN
LGNTVNNLSEARSRIEDSDYATEVSNMSRAQILQQAGTSVLAQANQVPQN
VLSLLASLVNRKQLEKMANVRFRTQEDEYVAILDALEEYHNMSENTVVEK
YLKLKDINSLTDIYIDTYKKSGRNKALKKFKEYLVTEVLELKNNNLTPVE
KNLHFVWIGGQINDTAINYINQWKDVNSDYNVNVFYDSNAFLINTLKKTV
VESAINDTLESFRENLNDPRFDYNKFFRKRMEIIYDKQKNFINYYKAQRE
ENPELIIDDIVKTYLSNEYSKEIDELNTYIEESLNKITQNSGNDVRNFEE
FKNGESFNLYEQELVERWNLAAASAILAISALKEIGGMALAVAMLPGIQP
DLFESIEKPSSVTVDFWEMTKLEAIMKYKEYIPEYTSEHFDMLDEEVQSS
FESVLASKSDKSEIFSSLGDMEASPLEVKIAFNSKGIINQGLISVKDSYC
SNLIVKQIENRYKILNNSLNPAISEDNDFNTTTNTFIDSIMAEANADNGR
FMMELGKYLRVGFFPDVKTTINLSGPEAYAAAYQDLLMFKEGSMNIHLIE
ADLRNFEISKTNISQSTEQEMASLWSFDDARAKAQFEEYKRNYFEGSLGE
D

[0140] SEQ ID NO: 19, STF2R3′(f1).GTD-A2 (The f1 fragment of TcdA RBD replaced D3 of flagellin with single underlined flexible linkers and C-terminal fusion with TcdA GTD, D269A+R272A+Y283A+D285A+D287A to abolish enzymatic activity; C. diff. antigen is double underlined)

MAQVINTNSLSLLTQNNLNKSQSALGTAIERLSSGLRINSAKDDAAGQAI
ANRFTANIKGLTQASRNANDGISIAQTTEGALNEINNNLQRVRELAVQSA
NSTNSQSDLDSIQAEITQRLNEIDRVSGQTQFNGVKVLAQDNTLTIQVGA
NDGETIDIDLKQINSQTLGLDSLNVQKAYDVKDTAVTTKAYANGGGGGNR
YYFEPNTAMGANGYKTIDNKNFYFRNGLPQIGVFKGSNGFEYFAPANTDA
NNIEGQAIRYQNRFLHLLGKIYYFGNNSKAVTGWQTINGKVYYFMPDTAM
AAAGGLFEIDGVIYFFGVDGVKAPGIYGGGGGELKDTPAVVSADAKNALI
AGGVDATDANGAELVKMSYTDKNGKTIEGGYALKAGDKYYAADYDEATGA
IKAKTTSYTAADGTTKTAANQLGGVDGKTEVVTIDGKTYNASKAAGHDFK
AQPELAEAAAKTTENPLQKIDAALAQVDALRSDLGAVQNRFNSAITNLGN
TVNNLSEARSRIEDSDYATEVSNMSRAQILQQAGTSVLAQANQVPQNVLS
LLASLISKEELIKLAYSIRPRENEYKTILTNLDEYNKLTTNNNENKYLQL
KKLNESIDVFMNKYKTSSRNRALSNLKKDILKEVILIKNSNTSPVEKNLH
FVWIGGEVSDIALEYIKQWADINAEYNIKLWYDSEAFLVNTLKKAIVESS
TTEALQLLEEEIQNPQFDNMKFYKKRMEFIYDRQKRFINYYKSQINKPTV
PTIDDIIKSHLVSEYNRDETVLESYRTNSLRKINSNHGIDIRANSLFTEQ
ELLNIYSQELLNRGNLAAAS IV LLALKNFGGVALAVAMLPGIHSDLFKTI
DLFKDLFKTISRPSSIGLDRWEMIKLEAIMKYKKYINNYTSENFDKLDQQ
SKSEKSEIFSKLENLNVSDLEIKIAFALGSVINQALISKQGSYLTNLVIE
QVKNRYQFLNQHLNPAIESDNNFTDTTKIFHDSLFNSATAENSMFLTKIA
PYLQVGFMPEARSTISLSGPGAYASAYYDFINLQENTIEKTLKASDLIEF
KFPENNLSQLTEQEINSLWSFDQASAKYQFEKYVRDYTGGSLSED

[0141] SEQ ID NO: 20, STF2R3′(f1).GTD-B2 (The f1 fragment of TcdB RBD replaced D3 of flagellin with single underlined flexible linkers and C-terminal fusion with TcdB GTD, D270A+R273A+Y284A+D286A+D288A to abolish enzymatic activity; C. diff. antigen is double underlined)

MAQVINTNSLSLLTQNNLNKSQSALGTAIERLSSGLRINSAKDDAAGQAI
ANRFTANIKGLTQASRNANDGISIAQTTEGALNEINNNLQRVRELAVQSA
NSTNSQSDLDSIQAEITQRLNEIDRVSGQTQFNGVKVLAQDNTLTIQVGA
NDGETIDIDLKQINSQTLGLDSLNVQKAYDVKDTAVTTKAYANGGGGGKY
YFNPETKKACKGINLIDDIKYYFDEKGIMRTGLISFENNNYYFNENGEMQ
FGYINIEDKMFYFGEDGVMQIGVFNTPDGFKYFAHQNTLDENFEGESINY
TGWLDLDEKRYYFTDEYIAATGSVIIDGEEYYFDPDTAQLVISEGGGGEL
KDTPAVVSADAKNALIAGGVDATDANGAELVKMSYTDKNGKTIEGGYALK
AGDKYYAADYDEATGAIKAKTTSYTAADGTTKTAANQLGGVDGKTEVVTI
DGKTYNASKAAGHDFKAQPELAEAAAKTTENPLQKIDAALAQVDALRSDL
GAVQNRFNSAITNLGNTVNNLSEARSRIEDSDYATEVSNMSRAQILQQAG
TSVLAQANQVPQNVLSLLAASLVNRKQLEKMANVRFRTQEDEYVAILDALE
EYHNMSENTVVEKYLKLKDINSLTDIYIDTYKKSGRNKALKKFKEYLVTE
VLELKNNNLTPVEKNLHFVWIGGQINDTAINYINQWKDVNSDYNVNVFYD
SNAFLINTLKKTVVESAINDTLESFRENLNDPRFDYNKFFRKRMEIIYDK
QKNFINYYKAQREENPELIIDDIVKTYLSNEYSKEIDELNTYIEESLNKI
TQNSGNDVRNFEEFKNGESFNLYEQELVERWNLAAASAILAISALKEIGG
MALAVAMLPGIQPDLFESIEKPSSVTVDFWEMTKLEAIMKYKEYIPEYTS
EHFDMLDEEVQSSFESVLASKSDKSEIFSSLGDMEASPLEVKIAFNSKGI
INQGLISVKDSYCSNLIVKQIENRYKILNNSLNPAISEDNDFNTTTNTFI
DSIMAEANADNGRFMMELGKYLRVGFFPDVKTTINLSGPEAYAAAYQDLL
MFKEGSMNIHLIEADLRNFEISKTNISQSTEQEMASLWSFDDARAKAQFE
EYKRNYFEGSLGED

[0142] SEQ ID NO: 21, STF2.CPD-A2 (C-terminal fusion with TcdA Cysteine Protease Domain, D589A+H655A+C700A to abolish enzymatic activity; C. diff. antigen is double underlined)

MAQVINTNSLSLLTQNNLNKSQSALGTAIERLSSGLRINSAKDDAAGQAI
ANRFTANIKGLTQASRNANDGISIAQTTEGALNEINNNLQRVRELAVQSA
NSTNSQSDLDSIQAEITQRLNEIDRVSGQTQFNGVKVLAQDNTLTIQVGA
NDGETIDIDLKQINSQTLGLDSLNVQKAYDVKDTAVTTKAYANNGTTLDV
SGLDDAAIKAATGGTNGTASVTGGAVKFDADNNKYFVTIGGFTGADAAKN
GDYEVNVATDGTVTLAAGATKTTMPAGATTKTEVQELKDTPAVVSADAKN
ALIAGGVDATDANGAELVKMSYTDKNGKTIEGGYALKAGDKYYAADYDEA
TGAIKAKTTSYTAADGTTKTAANQLGGVDGKTEVVTIDGKTYNASKAAGH
DFKAQPELAEAAAKTTENPLQKIDAALAQVDALRSDLGAVQNRFNSAITN
LGNTVNNLSEARSRIEDSDYATEVSNMSRAQILQQAGTSVLAQANQVPQN
VLSLLASEDNGVDFNKNTALDKNYLLNNKIPSNNVEEAGSKNYVHYIIQL
QGADISYEATCNLFSKNPKNSIIIQRNMNESAKSYFLSDDGESILELNKY
RIPERLKNKEKVKVTFIGAGKDEFNTSEFARLSVDSLSNEISSFLDTIKL
DISPKNVEVNLLGANMFSYDFNVEETYPGKLLLSIMDKITSTLPDVNKNS
ITIGANQYEVRINSEGRKELLAHSGKWINKEEAIMSDLSSKEYIFFDSID
NKLKAKSKNIPGLASISEDIKT

[0143] SEQ ID NO: 22, STF2.CPD-B2 (C-terminal fusion with TcdB Cysteine Protease Domain, D587A+H653A+C698A to abolish enzymatic activity; C. diff. antigen is double underlined)

MAQVINTNSLSLLTQNNLNKSQSALGTAIERLSSGLRINSAKDDAAGQAI
ANRFTANIKGLTQASRNANDGISIAQTTEGALNEINNNLQRVRELAVQSA
NSTNSQSDLDSIQAEITQRLNEIDRVSGQTQFNGVKVLAQDNTLTIQVGA
NDGETIDIDLKQINSQTLGLDSLNVQKAYDVKDTAVTTKAYANNGTTLDV
SGLDDAAIKAATGGTNGTASVTGGAVKFDADNNKYFVTIGGFTGADAAKN
GDYEVNVATDGTVTLAAGATKTTMPAGATTKTEVQELKDTPAVVSADAKN
ALIAGGVDATDANGAELVKMSYTDKNGKTIEGGYALKAGDKYYAADYDEA
TGAIKAKTTSYTAADGTTKTAANQLGGVDGKTEVVTIDGKTYNASKAAGH
DFKAQPELAEAAAKTTENPLQKIDAALAQVDALRSDLGAVQNRFNSAITN
LGNTVNNLSEARSRIEDSDYATEVSNMSRAQILQQAGTSVLAQANQVPQN
VLSLLAGEDDNLDFSQNIVVDKEYLLEKISSLARSSERGYIHYIVQLQGA
KISYEAACNLFAKTPYDSVLFQKNIEDSEIAYYYNPGDGEIQEIDKYKIP
SIISDRPKIKLTFIGAGKDEFNTDIFAGFDVDSLSTEIEAAIDLAKEDIS
PKSIEINLLGANMFSYSINVEETYPGKLLLKVKDKISELMPSISQDSIIV
SANQYEVRINSEGRRELLDHSGEWINKEESIIKDISSKEYISFNPKENKI
TVKSKNLPELSTLLQEIRN

[0144] SEQ ID NO: 23, STF2R3′(f1).CPD-A2 (The f1 fragment of TcdA RBD replaced D3 of flagellin with single underlined flexible linkers and C-terminal fusion with TcdA CPD, D589A+H655A+C700A to abolish enzymatic activity; C. diff. antigen is double underlined)

MAQVINTNSLSLLTQNNLNKSQSALGTAIERLSSGLRINSAKDDAAGQAI
ANRFTANIKGLTQASRNANDGISIAQTTEGALNEINNNLQRVRELAVQSA
NSTNSQSDLDSIQAEITQRLNEIDRVSGQTQFNGVKVLAQDNTLTIQVGA
NDGETIDIDLKQINSQTLGLDSLNVQKAYDVKDTAVTTKAYANGGGGGNR
YYFEPNTAMGANGYKTIDNKNFYFRNGLPQIGVFKGSNGFEYFAPANTDA
NNIEGQAIRYQNRFLHLLGKIYYFGNNSKAVTGWQTINGKVYYFMPDTAM
AAAGGLFEIDGVIYFFGVDGVKAPGIYGGGGGELKDTPAVVSADAKNALI
AGGVDATDANGAELVKMSYTDKNGKTIEGGYALKAGDKYYAADYDEATGA
IKAKTTSYTAADGTTKTAANQLGGVDGKTEVVTIDGKTYNASKAAGHDFK
AQPELAEAAAKTTENPLQKIDAALAQVDALRSDLGAVQNRFNSAITNLGN
TVNNLSEARSRIEDSDYATEVSNMSRAQILQQAGTSVLAQANQVPQNVLS
LLASEDNGVDFNKNTALDKNYLLNNKIPSNNVEEAGSKNYVHYIIQLQGA
DISYEATCNLFSKNPKNSIIIQRNMNESAKSYFLSDDGESILELNKYRIP
ERLKNKEKVKVTFIGAGKDEFNTSEFARLSVDSLSNEISSFLDTIKLDIS
PKNVEVNLLGANMFSYDFNVEETYPGKLLLSIMDKITSTLPDVNKNSITI
GANQYEVRINSEGRKELLAHSGKWINKEEAIMSDLSSKEYIFFDSIDNKL
KAKSKNIPGLASISEDIKT

[0145] SEQ ID NO: 24, STF2R3(f1).CPD-B2 (The f1 fragment of TcdB RBD replaced D3 of flagellin with single underlined flexible linkers and C-terminal fusion with TcdB CPD, D587A+H653A+C698A to abolish enzymatic activity; C. diff. antigen is double underlined).

MAQVINTNSLSLLTQNNLNKSQSALGTAIERLSSGLRINSAKDDAAGQAI
ANRFTANIKGLTQASRNANDGISIAQTTEGALNEINNNLQRVRELAVQSA
NSTNSQSDLDSIQAEITQRLNEIDRVSGQTQFNGVKVLAQDNTLTIQVGA
NDGETIDIDLKQINSQTLGLDSLNVQKAYDVKDTAVTTKAYANGGGGGKY
YFNPETKKACKGINLIDDIKYYFDEKGIMRTGLISFENNNYYFNENGEMQ
FGYINIEDKMFYFGEDGVMQIGVFNTPDGFKYFAHQNTLDENFEGESINY
TGWLDLDEKRYYFTDEYIAATGSVIIDGEEYYFDPDTAQLVISEGGGGEL
KDTPAVVSADAKNALIAGGVDATDANGAELVKMSYTDKNGKTIEGGYALK
AGDKYYAADYDEATGAIKAKTTSYTAADGTTKTAANQLGGVDGKTEVVTI
DGKTYNASKAAGHDFKAQPELAEAAAKTTENPLQKIDAALAQVDALRSDL
GAVQNRFNSAITNLGNTVNNLSEARSRIEDSDYATEVSNMSRAQILQQAG
TSVLAQANQVPQNVLSLLAGEDDNLDFSQNIVVDKEYLLEKISSLARSSE
RGYIHYIVQLQGAKISYEAACNLFAKTPYDSVLFQKNIEDSEIAYYYNPG
DGEIQEIDKYKIPSIISDRPKIKLTFIGAGKDEFNTDIFAGFDVDSLSTE
IEAAIDLAKEDISPKSIEINLLGANMFSYSINVEETYPGKLLLKVKDKIS
ELMPSISQDSIIVSANQYEVRINSEGRRELLDHSGEWINKEESIIKDISS
KEYISFNPKENKITVKSKNLPELSTLLQEIRN

[0146] SEQ ID NO: 25, HL928, STF2.RBD-A2 (C-terminal fusion with full receptor binding domain with residuesl8l2-2710 of TcdA; 40 repeats of C. diff. antigen in italics. Note: Single underline, short repeat; double underline, long repeat).

MAQVINTNSLSLLTQNNLNKSQSALGTAIERLSSGLRINSAKDDAAGQAI
ANRFTANIKGLTQASRNANDGISIAQTTEGALNEINNNLQRVRELAVQSA
NSTNSQSDLDSIQAEITQRLNEIDRVSGQTQFNGVKVLAQDNTLTIQVGA
NDGETIDIDLKQINSQTLGLDSLNVQKAYDVKDTAVTTKAYANNGTTLDV
SGLDDAAIKAATGGTNGTASVTGGAVKFDADNNKYFVTIGGFTGADAAKN
GDYEVNVATDGTVTLAAGATKTTMPAGATTKTEVQELKDTPAVVSADAKN
ALIAGGVDATDANGAELVKMSYTDKNGKTIEGGYALKAGDKYYAADYDEA
TGAIKAKTTSYTAADGTTKTAANQLGGVDGKTEVVTIDGKTYNASKAAGH
DFKAQPELAEAAAKTTENPLQKIDAALAQVDALRSDLGAVQNRFNSAITN
LGNTVNNLSEARSRIEDSDYATEVSNMSRAQILQQAGTSVLAQANQVPQN
VLSLLAGFKIIDNKTYYYDEDSKLVKGLININNSLFYFDPIEFNLVTGWQ
TINGKKYYFDINTGAALTSYKIINGKHFYFNNDGVMQLGVFKGPDGFEYF
APANTQNNNIEGQAIVYQSKFLTLNGKKYYFDNNSKAVTGWRIINNEKYY
FNPNNAIAAVGLQVIDNNKYYFNPDTAIISKGWQTVNGSRYYFDTDTAIA
FNGYKTIDGKHFYFDSDCVVKIGVFSTSNGFEYFAPANTYNNNIEGQAIV
YQSKFLTLNGKKYYFDNNSKAVTGWQTIDSKKYYFNTNTAEAATGWQTID
GKKYYFNTNTAEAATGWQTIDGKKYYFNTNTAIASTGYTIINGKHFYFNT
DGIMQIGVFKGPNGFEYFAPANTDANNIEGQAILYQNEFLTLNGKKYYFG
SDSKAVTGWRIINNKKYYFNPNNAIAAIHLCTINNDKYYFSYDGILQNGY
ITIERNNFYFDANNESKMVTGVFKGPNGFEYFAPANTHNNNIEGQAIVYQ
NKFLTLNGKKYYFDNDSKAVTGWQTIDGKKYYFNLNTAEAATGWQTIDGK
KYYFNLNTAEAATGWQTIDGKKYYFNTNTFIASTGYTSINGKHFYFNTDG
IMQIGVFKGPNGFEYFAPANTDANNIEGQAILYQNKFLTLNGKKYYFGSD
SKAVTGLRTIDGKKYYFNTNTAVAVTGWQTINGKKYYFNTNTSIASTGYT
IISGKHFYFNTDGIMQIGVFKGPDGFEYFAPANTDANNIEGQAIRYQNRF
LYLHDNIYYFGNNSKAATGWVTIDGNRYYFEPNTAMGANGYKTIDNKNFY
FRNGLPQIGVFKGSNGFEYFAPANTDANNIEGQAIRYQNRFLHLLGKIYY
FGNNSKAVTGWQTINGKVYYFMPDTAMAAAGGLFEIDGVIYFFGVDGVKA
PGIYG

[0147] SEQ ID NO: 26, HL929, STF2.RBD-B2 (C-terminal fusion with TcdB, full receptor binding residues 1814-2366, 24 repeats of C. diff. antigen in italics. Note: Single underline, short repeat; double underline, long repeat).

MAQVINTNSLSLLTQNNLNKSQSALGTAIERLSSGLRINSAKDDAAGQAI
ANRFTANIKGLTQASRNANDGISIAQTTEGALNEINNNLQRVRELAVQSA
NSTNSQSDLDSIQAEITQRLNEIDRVSGQTQFNGVKVLAQDNTLTIQVGA
NDGETIDIDLKQINSQTLGLDSLNVQKAYDVKDTAVTTKAYANNGTTLDV
SGLDDAAIKAATGGTNGTASVTGGAVKFDADNNKYFVTIGGFTGADAAKN
GDYEVNVATDGTVTLAAGATKTTMPAGATTKTEVQELKDTPAVVSADAKN
ALIAGGVDATDANGAELVKMSYTDKNGKTIEGGYALKAGDKYYAADYDEA
TGAIKAKTTSYTAADGTTKTAANQLGGVDGKTEVVTIDGKTYNASKAAGH
DFKAQPELAEAAAKTTENPLQKIDAALAQVDALRSDLGAVQNRFNSAITN
LGNTVNNLSEARSRIEDSDYATEVSNMSRAQILQQAGTSVLAQANQVPQN
VLSLLAGLVSLYNEKFYINNFGMMVSGLIYINDSLYYFKPPVNNLITGFV
TVGDDKYYFNPINGGAASIGETIIDDKNYYFNQSGVLQTGVFSTEDGFKY
FAPANTLDENLEGEAIDFTGKLIIDENIYYFDDNYRGAVEWKELDGEMHY
FSPETGKAFKGLNQIGDYKYYFNSDGVMQKGFVSINDNKHYFDDSGVMKV
GYTEIDGKHFYFAENGEMQIGVFNTEDGFKYFAHHNEDLGNEEGEEISYS
GILNFNNKIYYFDDSFTAVVGWKDLEDGSKYYFDEDTAEAYIGLSLINDG
QYYFNDDGIMQVGFVTINDKVFYFSDSGIIESGVQNIDDNYFYIDDNGIV
QIGVFDTSDGYKYFAPANTVNDNIYGQAVEYSGLVRVGEDVYYFGETYTI
ETGWIYDMENESDKYYFNPETKKACKGINLIDDIKYYFDEKGIMRTGLIS
FENNNYYFNENGEMQFGYINIEDKMFYFGEDGVMQIGVFNTPDGFKYFAH
QNTLDENFEGESINYTGWLDLDEKRYYFTDEYIAATGSVIIDGEEYYFDP
DTAQLVISE

[0148] SEQ ID NO: 27, STF2Δ.RBD-A2 (Full length RBD of TcdA in italics fused with STF2Δ)

MAQVINTNSLSLLTQNNLNKSQSALGTAIERLSSGLRINSAKDDAAGQAI
ANRFTANIKGLTQASRNANDGISIAQTTEGALNEINNNLQRVRELAVQSA
NSTNSQSDLDSIQAEITQRLNEIDRVSGQTQFNGVKVLAQDNTLTIQVGA
NDGETIDIDLKQINSQTLGLDSLNVQTTENPLQKIDAALAQVDALRSDLG
AVQNRFNSAITNLGNTVNNLSEARSRIEDSDYATEVSNMSRAQILQQAGT
SVLAQANQVPQNVLSLLAGFKIIDNKTYYYDEDSKLVKGLININNSLFYF
DPIEFNLVTGWQTINGKKYYFDINTGAALTSYKIINGKHFYFNNDGVMQL
GVFKGPDGFEYFAPANTQNNNIEGQAIVYQSKFLTLNGKKYYFDNNSKAV
TGWRIINNEKYYFNPNNAIAAVGLQVIDNNKYYFNPDTAIISKGWQTVNG
SRYYFDTDTAIAFNGYKTIDGKHFYFDSDCVVKIGVFSTSNGFEYFAPAN
TYNNNIEGQAIVYQSKFLTLNGKKYYFDNNSKAVTGWQTIDSKKYYFNTN
TAEAATGWQTIDGKKYYFNTNTAEAATGWQTIDGKKYYFNTNTAIASTGY
TIINGKHFYFNTDGIMQIGVFKGPNGFEYFAPANTDANNIEGQAILYQNE
FLTLNGKKYYFGSDSKAVTGWRIINNKKYYFNPNNAIAAIHLCTINNDKY
YFSYDGILQNGYITIERNNFYFDANNESKMVTGVFKGPNGFEYFAPANTH
NNNIEGQAIVYQNKFLTLNGKKYYFDNDSKAVTGWQTIDGKKYYFNLNTA
EAATGWQTIDGKKYYFNLNTAEAATGWQTIDGKKYYFNTNTFIASTGYTS
INGKHFYFNTDGIMQIGVFKGPNGFEYFAPANTDANNIEGQAILYQNKFL
TLNGKKYYFGSDSKAVTGLRTIDGKKYYFNTNTAVAVTGWQTINGKKYYF
NTNTSIASTGYTIISGKHFYFNTDGIMQIGVFKGPDGFEYFAPANTDANN
IEGQAIRYQNRFLYLHDNIYYFGNNSKAATGWVTIDGNRYYFEPNTAMGA
NGYKTIDNKNFYFRNGLPQIGVFKGSNGFEYFAPANTDANNIEGQAIRYQ
NRFLHLLGKIYYFGNNSKAVTGWQTINGKVYYFMPDTAMAAAGGLFEIDG
VIYFFGVDGVKAPGIYG

[0149] SEQ ID NO: 28, STF2Δ.RBD-B2 (Full length RBD of TcdB in italics fused with STF2Δ)

MAQVINTNSLSLLTQNNLNKSQSALGTAIERLSSGLRINSAKDDAAGQAI
ANRFTANIKGLTQASRNANDGISIAQTTEGALNEINNNLQRVRELAVQSA
NSTNSQSDLDSIQAEITQRLNEIDRVSGQTQFNGVKVLAQDNTLTIQVGA
NDGETIDIDLKQINSQTLGLDSLNVQTTENPLQKIDAALAQVDALRSDLG
AVQNRFNSAITNLGNTVNNLSEARSRIEDSDYATEVSNMSRAQILQQAGT
SVLAQANQVPQNVLSLLAGLVSLYNEKFYINNFGMMVSGLIYINDSLYYF
KPPVNNLITGFVTVGDDKYYFNPINGGAASIGETIIDDKNYYFNQSGVLQ
TGVFSTEDGFKYFAPANTLDENLEGEAIDFTGKLIIDENIYYFDDNYRGA
VEWKELDGEMHYFSPETGKAFKGLNQIGDYKYYFNSDGVMQKGFVSINDN
KHYFDDSGVMKVGYTEIDGKHFYFAENGEMQIGVFNTEDGFKYFAHHNED
LGNEEGEEISYSGILNFNNKIYYFDDSFTAVVGWKDLEDGSKYYFDEDTA
EAYIGLSLINDGQYYFNDDGIMQVGFVTINDKVFYFSDSGIIESGVQNID
DNYFYIDDNGIVQIGVFDTSDGYKYFAPANTVNDNIYGQAVEYSGLVRVG
EDVYYFGETYTIETGWIYDMENESDKYYFNPETKKACKGINLIDDIKYYF
DEKGIMRTGLISFENNNYYFNENGEMQFGYINIEDKMFYFGEDGVMQIGV
FNTPDGFKYFAHQNTLDENFEGESINYTGWLDLDEKRYYFTDEYIAATGS
VIIDGEEYYFDPDTAQLVISE

Mixing RBD-A and B in one construct

[0150] SEQ ID NO: 29, STF2R3′(f1-A).C.RBD-B2 (The f1 fragments of TcdA is used to replace D3 of flagellin with single underlined flexible linkers and C. diff. antigen is double underlined; the full RBD-B C. diff. antigen in italics is fused to the C-terminal of flagellin; Note: Single underline, short repeat; double underline, long repeat)

MAQVINTNSLSLLTQNNLNKSQSALGTAIERLSSGLRINSAKDDAAGQAI
ANRFTANIKGLTQASRNANDGISIAQTTEGALNEINNNLQRVRELAVQSA
NSTNSQSDLDSIQAEITQRLNEIDRVSGQTQFNGVKVLAQDNTLTIQVGA
NDGETIDIDLKQINSQTLGLDSLNVQKAYDVKDTAVTTKAYANGGGGGNR
YYFEPNTAMGANGYKTIDNKNFYFRNGLPQIGVFKGSNGFEYFAPANTDA
NNIEGQAIRYQNRFLHLLGKIYYFGNNSKAVTGWQTINGKVYYFMPDTAM
AAAGGLFEIDGVIYFFGVDGVKAPGIYGGGGGELKDTPAVVSADAKNALI
AGGVDATDANGAELVKMSYTDKNGKTIEGGYALKAGDKYYAADYDEATGA
IKAKTTSYTAADGTTKTAANQLGGVDGKTEVVTIDGKTYNASKAAGHDFK
AQPELAEAAAKTTENPLQKIDAALAQVDALRSDLGAVQNRFNSAITNLGN
TVNNLSEARSRIEDSDYATEVSNMSRAQILQQAGTSVLAQANQVPQNVLS
LLAGLVSLYNEKFYINNFGMMVSGLIYINDSLYYFKPPVNNLITGFVTVG
DDKYYFNPINGGAASIGETIIDDKNYYFNQSGVLQTGVFSTEDGFKYFAP
ANTLDENLEGEAIDFTGKLIIDENIYYFDDNYRGAVEWKELDGEMHYFSP
ETGKAFKGLNQIGDYKYYFNSDGVMQKGFVSINDNKHYFDDSGVMKVGYT
EIDGKHFYFAENGEMQIGVFNTEDGFKYFAHHNEDLGNEEGEEISYSGIL
NFNNKIYYFDDSFTAVVGWKDLEDGSKYYFDEDTAEAYIGLSLINDGQYY
FNDDGIMQVGFVTINDKVFYFSDSGIIESGVQNIDDNYFYIDDNGIVQIG
VFDTSDGYKYFAPANTVNDNIYGQAVEYSGLVRVGEDVYYFGETYTIETG
WIYDMENESDKYYFNPETKKACKGINLIDDIKYYFDEKGIMRTGLISFEN
NNYYFNENGEMQFGYINIEDKMFYFGEDGVMQIGVFNTPDGFKYFAHQNT
LDENFEGESINYTGWLDLDEKRYYFTDEYIAATGSVIIDGEEYYFDPDTA
QLVISE

[0151] SEQ ID NO: 30, STF2R3′(f1-B).C.RBD-A2 (The f1 fragments of TcdB is used to replace D3 of flagellin with single underlined flexible linkers and C. diff. antigen is double underlined; the full RBD-A C. diff. antigen in italics is fused to the C-terminal of flagellin; Note: Single underline, short repeat; double underline, long repeat)

MAQVINTNSLSLLTQNNLNKSQSALGTAIERLSSGLRINSAKDDAAGQAI
ANRFTANIKGLTQASRNANDGISIAQTTEGALNEINNNLQRVRELAVQSA
NSTNSQSDLDSIQAEITQRLNEIDRVSGQTQFNGVKVLAQDNTLTIQVGA
NDGETIDIDLKQINSQTLGLDSLNVQKAYDVKDTAVTTKAYANGGGGGKY
YFNPETKKACKGINLIDDIKYYFDEKGIMRTGLISFENNNYYFNENGEMQ
FGYINIEDKMFYFGEDGVMQIGVFNTPDGFKYFAHQNTLDENFEGESINY
TGWLDLDEKRYYFTDEYIAATGSVIIDGEEYYFDPDTAQLVISEGGGGEL
KDTPAVVSADAKNALIAGGVDATDANGAELVKMSYTDKNGKTIEGGYALK
AGDKYYAADYDEATGAIKAKTTSYTAADGTTKTAANQLGGVDGKTEVVTI
DGKTYNASKAAGHDFKAQPELAEAAAKTTENPLQKIDAALAQVDALRSDL
GAVQNRFNSAITNLGNTVNNLSEARSRIEDSDYATEVSNMSRAQILQQAG
TSVLAQANQVPQNVLSLLAGFKIIDNKTYYYDEDSKLVKGLININNSLFY
FDPIEFNLVTGWQTINGKKYYFDINTGAALTSYKIINGKHFYFNNDGVMQ
LGVFKGPDGFEYFAPANTQNNNIEGQAIVYQSKFLTLNGKKYYFDNNSKA
VTGWRIINNEKYYFNPNNAIAAVGLQVIDNNKYYFNPDTAIISKGWQTVN
GSRYYFDTDTAIAFNGYKTIDGKHFYFDSDCVVKIGVFSTSNGFEYFAPA
NTYNNNIEGQAIVYQSKFLTLNGKKYYFDNNSKAVTGWQTIDSKKYYFNT
NTAEAATGWQTIDGKKYYFNTNTAEAATGWQTIDGKKYYFNTNTAIASTG
YTIINGKHFYFNTDGIMQIGVFKGPNGFEYFAPANTDANNIEGQAILYQN
EFLTLNGKKYYFGSDSKAVTGWRIINNKKYYFNPNNAIAAIHLCTINNDK
YYFSYDGILQNGYITIERNNFYFDANNESKMVTGVFKGPNGFEYFAPANT
HNNNIEGQAIVYQNKFLTLNGKKYYFDNDSKAVTGWQTIDGKKYYFNLNT
AEAATGWQTIDGKKYYFNLNTAEAATGWQTIDGKKYYFNTNTFIASTGYT
SINGKHFYFNTDGIMQIGVFKGPNGFEYFAPANTDANNIEGQAILYQNKF
LTLNGKKYYFGSDSKAVTGLRTIDGKKYYFNTNTAVAVTGWQTINGKKYY
FNTNTSIASTGYTIISGKHFYFNTDGIMQIGVFKGPDGFEYFAPANTDAN
NIEGQAIRYQNRFLYLHDNIYYFGNNSKAATGWVTIDGNRYYFEPNTAMG
ANGYKTIDNKNFYFRNGLPQIGVFKGSNGFEYFAPANTDANNIEGQAIRY
QNRFLHLLGKIYYFGNNSKAVTGWQTINGKVYYFMPDTAMAAAGGLFEID
GVIYFFGVDGVKAPGIYG

[0152] SEQ ID NO: 31 STF2R3′(f1).RBD (The f1 fragments of TcdA is used to replace D3 of flagellin with single underlined flexible linkers and C. diff. antigen is double underlined; the TcdA-partial repeats in italics that resembles TcdB in pattern)

MAQVINTNSLSLLTQNNLNKSQSALGTAIERLSSGLRINSAKDDAAGQAI
ANRFTANIKGLTQASRNANDGISIAQTTEGALNEINNNLQRVRELAVQSA
NSTNSQSDLDSIQAEITQRLNEIDRVSGQTQFNGVKVLAQDNTLTIQVGA
NDGETIDIDLKQINSQTLGLDSLNVQKAYDVKDTAVTTKAYANGGGGGNR
YYFEPNTAMGANGYKTIDNKNFYFRNGLPQIGVFKGSNGFEYFAPANTDA
NNIEGQAIRYQNRFLHLLGKIYYFGNNSKAVTGWQTINGKVYYFMPDTAM
AAAGGLFEIDGVIYFFGVDGVKAPGIYGGGGGELKDTPAVVSADAKNALI
AGGVDATDANGAELVKMSYTDKNGKTIEGGYALKAGDKYYAADYDEATGA
IKAKTTSYTAADGTTKTAANQLGGVDGKTEVVTIDGKTYNASKAAGHDFK
AQPELAEAAAKTTENPLQKIDAALAQVDALRSDLGAVQNRFNSAITNLGN
TVNNLSEARSRIEDSDYATEVSNMSRAQILQQAGTSVLAQANQVPQNVLS
LLAISKGWQTVNGSRYYFDTDTAIAFNGYKTIDGKHFYFDSDCVVKIGVF
STSNGFEYFAPANTYNNNIEGQAIVYQSKFLTLNGKKYYFDNNSKAVTGW
QTIDSKKYYFNTNTAEAATGWQTIDGKKYYFNTNTAEAATGWQTIDGKKY
YFNTNTAIASTGYTIINGKHFYFNTDGIMQIGVFKGPNGFEYFAPANTDA
NNIEGQAILYQNEFLTLNGKKYYFGSDSKAVTGWRIINNKKYYFNPNNAI
AAIHLCTINNDKYYFSYDGILQNGYITIERNNFYFDANNESKMVTGVFKG
PNGFEYFAPANTHNNNIEGQAIVYQNKFLTLNGKKYYFDNDSKAVTGWQT
IDGKKYYFNLNTAEAATGWQTIDGKKYYFNLNTAEAAT

[0153] SEQ ID NO: 32, STF2.GTD-A1 (flagellin I423A C-terminal fusion with TcdA N-terminal Glucosyltransferase Domain (GTD), D269N+D285N to abolish enzymatic activity; C. diff. antigen is double underlined)

MAQVINTNSLSLLTQNNLNKSQSALGTAIERLSSGLRINSAKDDAAGQAI
ANRFTANIKGLTQASRNANDGISIAQTTEGALNEINNNLQRVRELAVQSA
NSTNSQSDLDSIQAEITQRLNEIDRVSGQTQFNGVKVLAQDNTLTIQVGA
NDGETIDIDLKQINSQTLGLDSLNVQKAYDVKDTAVTTKAYANNGTTLDV
SGLDDAAIKAATGGTNGTASVTGGAVKFDADNNKYFVTIGGFTGADAAKN
GDYEVNVATDGTVTLAAGATKTTMPAGATTKTEVQELKDTPAVVSADAKN
ALIAGGVDATDANGAELVKMSYTDKNGKTIEGGYALKAGDKYYAADYDEA
TGAIKAKTTSYTAADGTTKTAANQLGGVDGKTEVVTIDGKTYNASKAAGH
DFKAQPELAEAAAKTTENPLQKADAALAQVDALRSDLGAVQNRFNSAITN
LGNTVNNLSEARSRIEDSDYATEVSNMSRAQILQQAGTSVLAQANQVPQN
VLSLLASLISKEELIKLAYSIRPRENEYKTILTNLDEYNKLTTNNNENKY
LQLKKLNESIDVFMNKYKTSSRNRALSNLKKDILKEVILIKNSNTSPVEK
NLHFVWIGGEVSDIALEYIKQWADINAEYNIKLWYDSEAFLVNTLKKAIV
ESSTTEALQLLEEEIQNPQFDNMKFYKKRMEFIYDRQKRFINYYKSQINK
PTVPTIDDIIKSHLVSEYNRDETVLESYRTNSLRKINSNHGIDIRANSLF
TEQELLNIYSQELLNRGNLAAASNIVRLLALKNFGGVYLNVDMLPGIHSD
LFKTISRPSSIGLDRWEMIKLEAIMKYKKYINNYTSENFDKLDQQLKDNF
KLIIESKSEKSEIFSKLENLNVSDLEIKIAFALGSVINQALISKQGSYLT
NLVIEQVKNRYQFLNQHLNPAIESDNNFTDTTKIFHDSLFNSATAENSMF
LTKIAPYLQVGFMPEARSTISLSGPGAYASAYYDFINLQENTIEKTLKAS
DLIEFKFPENNLSQLTEQEINSLWSFDQASAKYQFEKYVRDYTGGSLSED

[0154] SEQ ID NO: 33, STF2.GTD-A1 (D3 deleted flagellin I423A and C-terminal fusion with TcdA GTD, D269N+D285N to abolish enzymatic activity; C. diff. antigen is double underlined)

MAQVINTNSLSLLTQNNLNKSQSALGTAIERLSSGLRINSAKDDAAGQAI
ANRFTANIKGLTQASRNANDGISIAQTTEGALNEINNNLQRVRELAVQSA
NSTNSQSDLDSIQAEITQRLNEIDRVSGQTQFNGVKVLAQDNTLTIQVGA
NDGETIDIDLKQINSQTLGLDSLNVQKAYDVKDTAVTTKAAVVSADAKNA
LIAGGVDATDANGAELVKMSYTDKNGKTIEGGYALKAGDKYYAADYDEAT
GAIKAKTTSYTAADGTTKTAANQLGGVDGKTEVVTIDGKTYNASKAAGHD
FKAQPELAEAAAKTTENPLQKADAALAQVDALRSDLGAVQNRFNSAITNL
GNTVNNLSEARSRIEDSDYATEVSNMSRAQILQQAGTSVLAQANQVPQNV
LSLLASLISKEELIKLAYSIRPRENEYKTILTNLDEYNKLTTNNNENKYL
QLKKLNESIDVFMNKYKTSSRNRALSNLKKDILKEVILIKNSNTSPVEKN
LHFVWIGGEVSDIALEYIKQWADINAEYNIKLWYDSEAFLVNTLKKAIVE
SSTTEALQLLEEEIQNPQFDNMKFYKKRMEFIYDRQKRFINYYKSQINKP
TVPTIDDIIKSHLVSEYNRDETVLESYRTNSLRKINSNHGIDIRANSLFT
EQELLNIYSQELLNRGNLAAASNIVRLLALKNFGGVYLNVDMLPGIHSDL
FKTISRPSSIGLDRWEMIKLEAIMKYKKYINNYTSENFDKLDQQLKDNFK
LIIESKSEKSEIFSKLENLNVSDLEIKIAFALGSVINQALISKQGSYLTN
LVIEQVKNRYQFLNQHLNPAIESDNNFTDTTKIFHDSLFNSATAENSMFL
TKIAPYLQVGFMPEARSTISLSGPGAYASAYYDFINLQENTIEKTLKASD
LIEFKFPENNLSQLTEQEINSLWSFDQASAKYQFEKYVRDYTGGSLSED

[0155] SEQ ID NO: 34, STF2.GTD-B1 (flagellin I423A C-terminal fusion with TcdB GTD, D270N+D286N to abolish enzymatic activity; C. diff. antigen is double underlined)

MAQVINTNSLSLLTQNNLNKSQSALGTAIERLSSGLRINSAKDDAAGQAI
ANRFTANIKGLTQASRNANDGISIAQTTEGALNEINNNLQRVRELAVQSA
NSTNSQSDLDSIQAEITQRLNEIDRVSGQTQFNGVKVLAQDNTLTIQVGA
NDGETIDIDLKQINSQTLGLDSLNVQKAYDVKDTAVTTKAYANNGTTLDV
SGLDDAAIKAATGGTNGTASVTGGAVKFDADNNKYFVTIGGFTGADAAKN
GDYEVNVATDGTVTLAAGATKTTMPAGATTKTEVQELKDTPAVVSADAKN
ALIAGGVDATDANGAELVKMSYTDKNGKTIEGGYALKAGDKYYAADYDEA
TGAIKAKTTSYTAADGTTKTAANQLGGVDGKTEVVTIDGKTYNASKAAGH
DFKAQPELAEAAAKTTENPLQKADAALAQVDALRSDLGAVQNRFNSAITN
LGNTVNNLSEARSRIEDSDYATEVSNMSRAQILQQAGTSVLAQANQVPQN
VLSLLASLVNRKQLEKMANVRFRTQEDEYVAILDALEEYHNMSENTVVEK
YLKLKDINSLTDIYIDTYKKSGRNKALKKFKEYLVTEVLELKNNNLTPVE
KNLHFVWIGGQINDTAINYINQWKDVNSDYNVNVFYDSNAFLINTLKKTV
VESAINDTLESFRENLNDPRFDYNKFFRKRMEIIYDKQKNFINYYKAQRE
ENPELIIDDIVKTYLSNEYSKEIDELNTYIEESLNKITQNSGNDVRNFEE
FKNGESFNLYEQELVERWNLAAASNILRISALKEIGGMYLNVDMLPGIQP
DLFESIEKPSSVTVDFWEMTKLEAIMKYKEYIPEYTSEHFDMLDEEVQSS
FESVLASKSDKSEIFSSLGDMEASPLEVKIAFNSKGIINQGLISVKDSYC
SNLIVKQIENRYKILNNSLNPAISEDNDFNTTTNTFIDSIMAEANADNGR
FMMELGKYLRVGFFPDVKTTINLSGPEAYAAAYQDLLMFKEGSMNIHLIE
ADLRNFEISKTNISQSTEQEMASLWSFDDARAKAQFEEYKRNYFEGSLGE
D

[0156] SEQ ID NO: 35, STF2.GTD-B1 (D3 deleted flagellin I423A and C-terminal fusion with TcdB GTD, D270N+D286N to abolish enzymatic activity; C. diff. antigen is double underlined)

MAQVINTNSLSLLTQNNLNKSQSALGTAIERLSSGLRINSAKDDAAGQAI
ANRFTANIKGLTQASRNANDGISIAQTTEGALNEINNNLQRVRELAVQSA
NSTNSQSDLDSIQAEITQRLNEIDRVSGQTQFNGVKVLAQDNTLTIQVGA
NDGETIDIDLKQINSQTLGLDSLNVQKAYDVKDTAVTTKAAVVSADAKNA
LIAGGVDATDANGAELVKMSYTDKNGKTIEGGYALKAGDKYYAADYDEAT
GAIKAKTTSYTAADGTTKTAANQLGGVDGKTEVVTIDGKTYNASKAAGHD
FKAQPELAEAAAKTTENPLQKADAALAQVDALRSDLGAVQNRFNSAITNL
GNTVNNLSEARSRIEDSDYATEVSNMSRAQILQQAGTSVLAQANQVPQNV
LSLLASLVNRKQLEKMANVRFRTQEDEYVAILDALEEYHNMSENTVVEKY
LKLKDINSLTDIYIDTYKKSGRNKALKKFKEYLVTEVLELKNNNLTPVEK
NLHFVWIGGQINDTAINYINQWKDVNSDYNVNVFYDSNAFLINTLKKTVV
ESAINDTLESFRENLNDPRFDYNKFFRKRMEIIYDKQKNFINYYKAQREE
NPELIIDDIVKTYLSNEYSKEIDELNTYIEESLNKITQNSGNDVRNFEEF
KNGESFNLYEQELVERWNLAAASNILRISALKEIGGMYLNVDMLPGIQPD
LFESIEKPSSVTVDFWEMTKLEAIMKYKEYIPEYTSEHFDMLDEEVQSSF
ESVLASKSDKSEIFSSLGDMEASPLEVKIAFNSKGIINQGLISVKDSYCS
NLIVKQIENRYKILNNSLNPAISEDNDFNTTTNTFIDSIMAEANADNGRF
MMELGKYLRVGFFPDVKTTINLSGPEAYAAAYQDLLMFKEGSMNIHLIEA
DLRNFEISKTNISQSTEQEMASLWSFDDARAKAQFEEYKRNYFEGSLGED

[0157] SEQ ID NO: 36, STF2.GTD-A2 (flagellin I423A C-terminal fusion with TcdA GTD, D269A+R272A+Y283A+D285A+D287A to abolish enzymatic activity; C. diff. antigen is double underlined)

MAQVINTNSLSLLTQNNLNKSQSALGTAIERLSSGLRINSAKDDAAGQAI
ANRFTANIKGLTQASRNANDGISIAQTTEGALNEINNNLQRVRELAVQSA
NSTNSQSDLDSIQAEITQRLNEIDRVSGQTQFNGVKVLAQDNTLTIQVGA
NDGETIDIDLKQINSQTLGLDSLNVQKAYDVKDTAVTTKAYANNGTTLDV
SGLDDAAIKAATGGTNGTASVTGGAVKFDADNNKYFVTIGGFTGADAAKN
GDYEVNVATDGTVTLAAGATKTTMPAGATTKTEVQELKDTPAVVSADAKN
ALIAGGVDATDANGAELVKMSYTDKNGKTIEGGYALKAGDKYYAADYDEA
TGAIKAKTTSYTAADGTTKTAANQLGGVDGKTEVVTIDGKTYNASKAAGH
DFKAQPELAEAAAKTTENPLQKADAALAQVDALRSDLGAVQNRFNSAITN
LGNTVNNLSEARSRIEDSDYATEVSNMSRAQILQQAGTSVLAQANQVPQN
VLSLLASLISKEELIKLAYSIRPRENEYKTILTNLDEYNKLTTNNNENKY
LQLKKLNESIDVFMNKYKTSSRNRALSNLKKDILKEVILIKNSNTSPVEK
NLHFVWIGGEVSDIALEYIKQWADINAEYNIKLWYDSEAFLVNTLKKAIV
ESSTTEALQLLEEEIQNPQFDNMKFYKKRMEFIYDRQKRFINYYKSQINK
PTVPTIDDIIKSHLVSEYNRDETVLESYRTNSLRKINSNHGIDIRANSLF
TEQELLNIYSQELLNRGNLAAASAIVALLALKNFGGVALAVAMLPGIHSD
LFKTISRPSSIGLDRWEMIKLEAIMKYKKYINNYTSENFDKLDQQLKDNF
KLIIESKSEKSEIFSKLENLNVSDLEIKIAFALGSVINQALISKQGSYLT
NLVIEQVKNRYQFLNQHLNPAIESDNNFTDTTKIFHDSLFNSATAENSMF
LTKIAPYLQVGFMPEARSTISLSGPGAYASAYYDFINLQENTIEKTLKAS
DLIEFKFPENNLSQLTEQEINSLWSFDQASAKYQFEKYVRDYTGGSLSED

[0158] SEQ ID NO: 37, STF2.GTD-A2 (D3 deleted flagellin I423A and C-terminal fusion with TcdA GTD, D269A+R272A+Y283A+D285A+D287A to abolish enzymatic activity; C. diff. antigen is double underlined)

MAQVINTNSLSLLTQNNLNKSQSALGTAIERLSSGLRINSAKDDAAGQAI
ANRFTANIKGLTQASRNANDGISIAQTTEGALNEINNNLQRVRELAVQSA
NSTNSQSDLDSIQAEITQRLNEIDRVSGQTQFNGVKVLAQDNTLTIQVGA
NDGETIDIDLKQINSQTLGLDSLNVQKAYDVKDTAVTTKAAVVSADAKNA
LIAGGVDATDANGAELVKMSYTDKNGKTIEGGYALKAGDKYYAADYDEAT
GAIKAKTTSYTAADGTTKTAANQLGGVDGKTEVVTIDGKTYNASKAAGHD
FKAQPELAEAAAKTTENPLQKADAALAQVDALRSDLGAVQNRFNSAITNL
GNTVNNLSEARSRIEDSDYATEVSNMSRAQILQQAGTSVLAQANQVPQNV
LSLLASLISKEELIKLAYSIRPRENEYKTILTNLDEYNKLTTNNNENKYL
QLKKLNESIDVFMNKYKTSSRNRALSNLKKDILKEVILIKNSNTSPVEKN
LHFVWIGGEVSDIALEYIKQWADINAEYNIKLWYDSEAFLVNTLKKAIVE
SSTTEALQLLEEEIQNPQFDNMKFYKKRMEFIYDRQKRFINYYKSQINKP
TVPTIDDIIKSHLVSEYNRDETVLESYRTNSLRKINSNHGIDIRANSLFT
EQELLNIYSQELLNRGNLAAASAIVALLALKNFGGVALAVAMLPGIHSDL
FKTISRPSSIGLDRWEMIKLEAIMKYKKYINNYTSENFDKLDQQLKDNFK
LIIESKSEKSEIFSKLENLNVSDLEIKIAFALGSVINQALISKQGSYLTN
LVIEQVKNRYQFLNQHLNPAIESDNNFTDTTKIFHDSLFNSATAENSMFL
TKIAPYLQVGFMPEARSTISLSGPGAYASAYYDFINLQENTIEKTLKASD
LIEFKFPENNLSQLTEQEINSLWSFDQASAKYQFEKYVRDYTGGSLSED

[0159] SEQ ID NO: 38, STF2.GTD-B2 (flagellin I423A C-terminal fusion with TcdB GTD, D270A+R273A+Y284A+D286A+D288A to abolish enzymatic activity; C. diff. antigen is double underlined)

MAQVINTNSLSLLTQNNLNKSQSALGTAIERLSSGLRINSAKDDAAGQAI
ANRFTANIKGLTQASRNANDGISIAQTTEGALNEINNNLQRVRELAVQSA
NSTNSQSDLDSIQAEITQRLNEIDRVSGQTQFNGVKVLAQDNTLTIQVGA
NDGETIDIDLKQINSQTLGLDSLNVQKAYDVKDTAVTTKAYANNGTTLDV
SGLDDAAIKAATGGTNGTASVTGGAVKFDADNNKYFVTIGGFTGADAAKN
GDYEVNVATDGTVTLAAGATKTTMPAGATTKTEVQELKDTPAVVSADAKN
ALIAGGVDATDANGAELVKMSYTDKNGKTIEGGYALKAGDKYYAADYDEA
TGAIKAKTTSYTAADGTTKTAANQLGGVDGKTEVVTIDGKTYNASKAAGH
DFKAQPELAEAAAKTTENPLQKADAALAQVDALRSDLGAVQNRFNSAITN
LGNTVNNLSEARSRIEDSDYATEVSNMSRAQILQQAGTSVLAQANQVPQN
VLSLLASLVNRKQLEKMANVRFRTQEDEYVAILDALEEYHNMSENTVVEK
YLKLKDINSLTDIYIDTYKKSGRNKALKKFKEYLVTEVLELKNNNLTPVE
KNLHFVWIGGQINDTAINYINQWKDVNSDYNVNVFYDSNAFLINTLKKTV
VESAINDTLESFRENLNDPRFDYNKFFRKRMEIIYDKQKNFINYYKAQRE
ENPELIIDDIVKTYLSNEYSKEIDELNTYIEESLNKITQNSGNDVRNFEE
FKNGESFNLYEQELVERWNLAAASAILAISALKEIGGMALAVAMLPGIQP
DLFESIEKPSSVTVDFWEMTKLEAIMKYKEYIPEYTSEHFDMLDEEVQSS
FESVLASKSDKSEIFSSLGDMEASPLEVKIAFNSKGIINQGLISVKDSYC
SNLIVKQIENRYKILNNSLNPAISEDNDFNTTTNTFIDSIMAEANADNGR
FMMELGKYLRVGFFPDVKTTINLSGPEAYAAAYQDLLMFKEGSMNIHLIE
ADLRNFEISKTNISQSTEQEMASLWSFDDARAKAQFEEYKRNYFEGSLGE
D

[0160] SEQ ID NO: 39, STF2.GTD-B2 (D3 deleted flagellin I423A and C-terminal fusion with TcdB GTD, D270A+R273A+Y284A+D286A+D288A to abolish enzymatic activity; C. diff. antigen is double underlined)

MAQVINTNSLSLLTQNNLNKSQSALGTAIERLSSGLRINSAKDDAAGQAI
ANRFTANIKGLTQASRNANDGISIAQTTEGALNEINNNLQRVRELAVQSA
NSTNSQSDLDSIQAEITQRLNEIDRVSGQTQFNGVKVLAQDNTLTIQVGA
NDGETIDIDLKQINSQTLGLDSLNVQKAYDVKDTAVTTKAAVVSADAKNA
LIAGGVDATDANGAELVKMSYTDKNGKTIEGGYALKAGDKYYAADYDEAT
GAIKAKTTSYTAADGTTKTAANQLGGVDGKTEVVTIDGKTYNASKAAGHD
FKAQPELAEAAAKTTENPLQKADAALAQVDALRSDLGAVQNRFNSAITNL
GNTVNNLSEARSRIEDSDYATEVSNMSRAQILQQAGTSVLAQANQVPQNV
LSLLASLVNRKQLEKMANVRFRTQEDEYVAILDALEEYHNMSENTVVEKY
LKLKDINSLTDIYIDTYKKSGRNKALKKFKEYLVTEVLELKNNNLTPVEK
NLHFVWIGGQINDTAINYINQWKDVNSDYNVNVFYDSNAFLINTLKKTVV
ESAINDTLESFRENLNDPRFDYNKFFRKRMEIIYDKQKNFINYYKAQREE
NPELIIDDIVKTYLSNEYSKEIDELNTYIEESLNKITQNSGNDVRNFEEF
KNGESFNLYEQELVERWNLAAASAILAISALKEIGGMALAVAMLPGIQPD
LFESIEKPSSVTVDFWEMTKLEAIMKYKEYIPEYTSEHFDMLDEEVQSSF
ESVLASKSDKSEIFSSLGDMEASPLEVKIAFNSKGIINQGLISVKDSYCS
NLIVKQIENRYKILNNSLNPAISEDNDFNTTTNTFIDSIMAEANADNGRF
MMELGKYLRVGFFPDVKTTINLSGPEAYAAAYQDLLMFKEGSMNIHLIEA
DLRNFEISKTNISQSTEQEMASLWSFDDARAKAQFEEYKRNYFEGSLGED

[0161] SEQ ID NO: 40, STF2.CPD-A1 (flagellin I423A C-terminal fusion with TcdA Cysteine Protease Domain (CPD), D589N+H655A+C700S to abolish enzymatic activity; C. diff. antigen is double underlined)

MAQVINTNSLSLLTQNNLNKSQSALGTAIERLSSGLRINSAKDDAAGQAI
ANRFTANIKGLTQASRNANDGISIAQTTEGALNEINNNLQRVRELAVQSA
NSTNSQSDLDSIQAEITQRLNEIDRVSGQTQFNGVKVLAQDNTLTIQVGA
NDGETIDIDLKQINSQTLGLDSLNVQKAYDVKDTAVTTKAYANNGTTLDV
SGLDDAAIKAATGGTNGTASVTGGAVKFDADNNKYFVTIGGFTGADAAKN
GDYEVNVATDGTVTLAAGATKTTMPAGATTKTEVQELKDTPAVVSADAKN
ALIAGGVDATDANGAELVKMSYTDKNGKTIEGGYALKAGDKYYAADYDEA
TGAIKAKTTSYTAADGTTKTAANQLGGVDGKTEVVTIDGKTYNASKAAGH
DFKAQPELAEAAAKTTENPLQKADAALAQVDALRSDLGAVQNRFNSAITN
LGNTVNNLSEARSRIEDSDYATEVSNMSRAQILQQAGTSVLAQANQVPQN
VLSLLASEDNGVDFNKNTALDKNYLLNNKIPSNNVEEAGSKNYVHYIIQL
QGNDISYEATCNLFSKNPKNSIIIQRNMNESAKSYFLSDDGESILELNKY
RIPERLKNKEKVKVTFIGAGKDEFNTSEFARLSVDSLSNEISSFLDTIKL
DISPKNVEVNLLGSNMFSYDFNVEETYPGKLLLSIMDKITSTLPDVNKNS
ITIGANQYEVRINSEGRKELLAHSGKWINKEEAIMSDLSSKEYIFFDSID
NKLKAKSKNIPGLASISEDIKT

[0162] SEQ ID NO: 41, STF2.CPD-A1 (D3 deleted flagellin I423A and C-terminal fusion with TcdA Cysteine Protease Domain, D589N+H655A+C700S to abolish enzymatic activity; C. diff. antigen is double underlined)

MAQVINTNSLSLLTQNNLNKSQSALGTAIERLSSGLRINSAKDDAAGQAI
ANRFTANIKGLTQASRNANDGISIAQTTEGALNEINNNLQRVRELAVQSA
NSTNSQSDLDSIQAEITQRLNEIDRVSGQTQFNGVKVLAQDNTLTIQVGA
NDGETIDIDLKQINSQTLGLDSLNVQKAYDVKDTAVTTKAAVVSADAKNA
LIAGGVDATDANGAELVKMSYTDKNGKTIEGGYALKAGDKYYAADYDEAT
GAIKAKTTSYTAADGTTKTAANQLGGVDGKTEVVTIDGKTYNASKAAGHD
FKAQPELAEAAAKTTENPLQKADAALAQVDALRSDLGAVQNRFNSAITNL
GNTVNNLSEARSRIEDSDYATEVSNMSRAQILQQAGTSVLAQANQVPQNV
LSLLASEDNGVDFNKNTALDKNYLLNNKIPSNNVEEAGSKNYVHYIIQLQ
GNDISYEATCNLFSKNPKNSIIIQRNMNESAKSYFLSDDGESILELNKYR
IPERLKNKEKVKVTFIGAGKDEFNTSEFARLSVDSLSNEISSFLDTIKLD
ISPKNVEVNLLGSNMFSYDFNVEETYPGKLLLSIMDKITSTLPDVNKNSI
TIGANQYEVRINSEGRKELLAHSGKWINKEEAIMSDLSSKEYIFFDSIDN
KLKAKSKNIPGLASISEDIKT

[0163] SEQ ID NO: 42, STF2.CPD-B1 (flagellin I423A C-terminal fusion with TcdB Cysteine Protease Domain, D587N+H653A+C698S to abolish enzymatic activity; C. diff. antigen is double underlined)

MAQVINTNSLSLLTQNNLNKSQSALGTAIERLSSGLRINSAKDDAAGQAI
ANRFTANIKGLTQASRNANDGISIAQTTEGALNEINNNLQRVRELAVQSA
NSTNSQSDLDSIQAEITQRLNEIDRVSGQTQFNGVKVLAQDNTLTIQVGA
NDGETIDIDLKQINSQTLGLDSLNVQKAYDVKDTAVTTKAYANNGTTLDV
SGLDDAAIKAATGGTNGTASVTGGAVKFDADNNKYFVTIGGFTGADAAKN
GDYEVNVATDGTVTLAAGATKTTMPAGATTKTEVQELKDTPAVVSADAKN
ALIAGGVDATDANGAELVKMSYTDKNGKTIEGGYALKAGDKYYAADYDEA
TGAIKAKTTSYTAADGTTKTAANQLGGVDGKTEVVTIDGKTYNASKAAGH
DFKAQPELAEAAAKTTENPLQKADAALAQVDALRSDLGAVQNRFNSAITN
LGNTVNNLSEARSRIEDSDYATEVSNMSRAQILQQAGTSVLAQANQVPQN
VLSLLAGEDDNLDFSQNIVVDKEYLLEKISSLARSSERGYIHYIVQLQGN
KISYEAACNLFAKTPYDSVLFQKNIEDSEIAYYYNPGDGEIQEIDKYKIP
SIISDRPKIKLTFIGAGKDEFNTDIFAGFDVDSLSTEIEAAIDLAKEDIS
PKSIEINLLGSNMFSYSINVEETYPGKLLLKVKDKISELMPSISQDSIIV
SANQYEVRINSEGRRELLDHSGEWINKEESIIKDISSKEYISFNPKENKI
TVKSKNLPELSTLLQEIRN

[0164] SEQ ID NO: 43, STF2.CPD-B1 (D3 deleted flagellin I423A and C-terminal fusion with TcdB Cysteine Protease Domain, D587N+H653A+C698S to abolish enzymatic activity; C. diff. antigen is double underlined)

MAQVINTNSLSLLTQNNLNKSQSALGTAIERLSSGLRINSAKDDAAGQAI
ANRFTANIKGLTQASRNANDGISIAQTTEGALNEINNNLQRVRELAVQSA
NSTNSQSDLDSIQAEITQRLNEIDRVSGQTQFNGVKVLAQDNTLTIQVGA
NDGETIDIDLKQINSQTLGLDSLNVQKAYDVKDTAVTTKAAVVSADAKNA
LIAGGVDATDANGAELVKMSYTDKNGKTIEGGYALKAGDKYYAADYDEAT
GAIKAKTTSYTAADGTTKTAANQLGGVDGKTEVVTIDGKTYNASKAAGHD
FKAQPELAEAAAKTTENPLQKADAALAQVDALRSDLGAVQNRFNSAITNL
GNTVNNLSEARSRIEDSDYATEVSNMSRAQILQQAGTSVLAQANQVPQNV
LSLLAGEDDNLDFSQNIVVDKEYLLEKISSLARSSERGYIHYIVQLQGNK
ISYEAACNLFAKTPYDSVLFQKNIEDSEIAYYYNPGDGEIQEIDKYKIPS
IISDRPKIKLTFIGAGKDEFNTDIFAGFDVDSLSTEIEAAIDLAKEDISP
KSIEINLLGSNMFSYSINVEETYPGKLLLKVKDKISELMPSISQDSIIVS
ANQYEVRINSEGRRELLDHSGEWINKEESIIKDISSKEYISFNPKENKIT
VKSKNLPELSTLLQEIRN

[0165] SEQ ID NO: 44, STF2.CPD-A2 (flagellin I423A C-terminal fusion with TcdA Cysteine Protease Domain, D589A+H655A+C700A to abolish enzymatic activity; C. diff. antigen is double underlined)

MAQVINTNSLSLLTQNNLNKSQSALGTAIERLSSGLRINSAKDDAAGQAI
ANRFTANIKGLTQASRNANDGISIAQTTEGALNEINNNLQRVRELAVQSA
NSTNSQSDLDSIQAEITQRLNEIDRVSGQTQFNGVKVLAQDNTLTIQVGA
NDGETIDIDLKQINSQTLGLDSLNVQKAYDVKDTAVTTKAYANNGTTLDV
SGLDDAAIKAATGGTNGTASVTGGAVKFDADNNKYFVTIGGFTGADAAKN
GDYEVNVATDGTVTLAAGATKTTMPAGATTKTEVQELKDTPAVVSADAKN
ALIAGGVDATDANGAELVKMSYTDKNGKTIEGGYALKAGDKYYAADYDEA
TGAIKAKTTSYTAADGTTKTAANQLGGVDGKTEVVTIDGKTYNASKAAGH
DFKAQPELAEAAAKTTENPLQKADAALAQVDALRSDLGAVQNRFNSAITN
LGNTVNNLSEARSRIEDSDYATEVSNMSRAQILQQAGTSVLAQANQVPQN
VLSLLASEDNGVDFNKNTALDKNYLLNNKIPSNNVEEAGSKNYVHYIIQL
QGADISYEATCNLFSKNPKNSIIIQRNMNESAKSYFLSDDGESILELNKY
RIPERLKNKEKVKVTFIGAGKDEFNTSEFARLSVDSLSNEISSFLDTIKL
DISPKNVEVNLLGANMFSYDFNVEETYPGKLLLSIMDKITSTLPDVNKNS
ITIGANQYEVRINSEGRKELLAHSGKWINKEEAIMSDLSSKEYIFFDSID
NKLKAKSKNIPGLASISEDIKT

[0166] SEQ ID NO: 45, STF2.CPD-A2 (D3 deleted flagellin I423A and C-terminal fusion with TcdA Cysteine Protease Domain, D589A+H655A+C700A to abolish enzymatic activity; C. diff. antigen is double underlined)

MAQVINTNSLSLLTQNNLNKSQSALGTAIERLSSGLRINSAKDDAAGQAI
ANRFTANIKGLTQASRNANDGISIAQTTEGALNEINNNLQRVRELAVQSA
NSTNSQSDLDSIQAEITQRLNEIDRVSGQTQFNGVKVLAQDNTLTIQVGA
NDGETIDIDLKQINSQTLGLDSLNVQKAYDVKDTAVTTKAAVVSADAKNA
LIAGGVDATDANGAELVKMSYTDKNGKTIEGGYALKAGDKYYAADYDEAT
GAIKAKTTSYTAADGTTKTAANQLGGVDGKTEVVTIDGKTYNASKAAGHD
FKAQPELAEAAAKTTENPLQKADAALAQVDALRSDLGAVQNRFNSAITNL
GNTVNNLSEARSRIEDSDYATEVSNMSRAQILQQAGTSVLAQANQVPQNV
LSLLASEDNGVDFNKNTALDKNYLLNNKIPSNNVEEAGSKNYVHYIIQLQ
GADISYEATCNLFSKNPKNSIIIQRNMNESAKSYFLSDDGESILELNKYR
IPERLKNKEKVKVTFIGAGKDEFNTSEFARLSVDSLSNEISSFLDTIKLD
ISPKNVEVNLLGANMFSYDFNVEETYPGKLLLSIMDKITSTLPDVNKNSI
TIGANQYEVRINSEGRKELLAHSGKWINKEEAIMSDLSSKEYIFFDSIDN
KLKAKSKNIPGLASISEDIKT

[0167] SEQ ID NO: 46, STF2.CPD-B2 (flagellin I423A C-terminal fusion with TcdB Cysteine Protease Domain, D587A+H653A+C698A to abolish enzymatic activity; C. diff. antigen is double underlined)

MAQVINTNSLSLLTQNNLNKSQSALGTAIERLSSGLRINSAKDDAAGQAI
ANRFTANIKGLTQASRNANDGISIAQTTEGALNEINNNLQRVRELAVQSA
NSTNSQSDLDSIQAEITQRLNEIDRVSGQTQFNGVKVLAQDNTLTIQVGA
NDGETIDIDLKQINSQTLGLDSLNVQKAYDVKDTAVTTKAYANNGTTLDV
SGLDDAAIKAATGGTNGTASVTGGAVKFDADNNKYFVTIGGFTGADAAKN
GDYEVNVATDGTVTLAAGATKTTMPAGATTKTEVQELKDTPAVVSADAKN
ALIAGGVDATDANGAELVKMSYTDKNGKTIEGGYALKAGDKYYAADYDEA
TGAIKAKTTSYTAADGTTKTAANQLGGVDGKTEVVTIDGKTYNASKAAGH
DFKAQPELAEAAAKTTENPLQKADAALAQVDALRSDLGAVQNRFNSAITN
LGNTVNNLSEARSRIEDSDYATEVSNMSRAQILQQAGTSVLAQANQVPQN
VLSLLAGEDDNLDFSQNIVVDKEYLLEKISSLARSSERGYIHYIVQLQGA
KISYEAACNLFAKTPYDSVLFQKNIEDSEIAYYYNPGDGEIQEIDKYKIP
SIISDRPKIKLTFIGAGKDEFNTDIFAGFDVDSLSTEIEAAIDLAKEDIS
PKSIEINLLGANMFSYSINVEETYPGKLLLKVKDKISELMPSISQDSIIV
SANQYEVRINSEGRRELLDHSGEWINKEESIIKDISSKEYISFNPKENKI
TVKSKNLPELSTLLQEIRN

[0168] SEQ ID NO: 47, STF2.CPD-B2 (D3 deleted flagellin I423A and C-terminal fusion with TcdB Cysteine Protease Domain, D587A+H653A+C698A to abolish enzymatic activity; C. diff. antigen is double underlined)

MAQVINTNSLSLLTQNNLNKSQSALGTAIERLSSGLRINSAKDDAAGQAI
ANRFTANIKGLTQASRNANDGISIAQTTEGALNEINNNLQRVRELAVQSA
NSTNSQSDLDSIQAEITQRLNEIDRVSGQTQFNGVKVLAQDNTLTIQVGA
NDGETIDIDLKQINSQTLGLDSLNVQKAYDVKDTAVTTKAAVVSADAKNA
LIAGGVDATDANGAELVKMSYTDKNGKTIEGGYALKAGDKYYAADYDEAT
GAIKAKTTSYTAADGTTKTAANQLGGVDGKTEVVTIDGKTYNASKAAGHD
FKAQPELAEAAAKTTENPLQKADAALAQVDALRSDLGAVQNRFNSAITNL
GNTVNNLSEARSRIEDSDYATEVSNMSRAQILQQAGTSVLAQANQVPQNV
LSLLAGEDDNLDFSQNIVVDKEYLLEKISSLARSSERGYIHYIVQLQGAK
ISYEAACNLFAKTPYDSVLFQKNIEDSEIAYYYNPGDGEIQEIDKYKIPS
IISDRPKIKLTFIGAGKDEFNTDIFAGFDVDSLSTEIEAAIDLAKEDISP
KSIEINLLGANMFSYSINVEETYPGKLLLKVKDKISELMPSISQDSIIVS
ANQYEVRINSEGRRELLDHSGEWINKEESIIKDISSKEYISFNPKENKIT
VKSKNLPELSTLLQEIRN

[0169] SEQ ID NO: 48, STF2.RBD-A2 (flagellin I423A and C-terminal fusion with FULL RECEPTOR BINDING DOMAIN (RBD) 1812-2710 IN ITALICS. 40 REPEATS).

MAQVINTNSLSLLTQNNLNKSQSALGTAIERLSSGLRINSAKDDAAGQAI
ANRFTANIKGLTQASRNANDGISIAQTTEGALNEINNNLQRVRELAVQSA
NSTNSQSDLDSIQAEITQRLNEIDRVSGQTQFNGVKVLAQDNTLTIQVGA
NDGETIDIDLKQINSQTLGLDSLNVQKAYDVKDTAVTTKAYANNGTTLDV
SGLDDAAIKAATGGTNGTASVTGGAVKFDADNNKYFVTIGGFTGADAAKN
GDYEVNVATDGTVTLAAGATKTTMPAGATTKTEVQELKDTPAVVSADAKN
ALIAGGVDATDANGAELVKMSYTDKNGKTIEGGYALKAGDKYYAADYDEA
TGAIKAKTTSYTAADGTTKTAANQLGGVDGKTEVVTIDGKTYNASKAAGH
DFKAQPELAEAAAKTTENPLQKADAALAQVDALRSDLGAVQNRFNSAITN
LGNTVNNLSEARSRIEDSDYATEVSNMSRAQILQQAGTSVLAQANQVPQN
VLSLLAGFKIIDNKTYYYDEDSKLVKGLININNSLFYFDPIEFNLVTGWQ
TINGKKYYFDINTGAALTSYKIINGKHFYFNNDGVMQLGVFKGPDGFEYF
APANTQNNNIEGQAIVYQSKFLTLNGKKYYFDNNSKAVTGWRIINNEKYY
FNPNNAIAAVGLQVIDNNKYYFNPDTAIISKGWQTVNGSRYYFDTDTAIA
FNGYKTIDGKHFYFDSDCVVKIGVFSTSNGFEYFAPANTYNNNIEGQAIV
YQSKFLTLNGKKYYFDNNSKAVTGWQTIDSKKYYFNTNTAEAATGWQTID
GKKYYFNTNTAEAATGWQTIDGKKYYFNTNTAIASTGYTIINGKHFYFNT
DGIMQIGVFKGPNGFEYFAPANTDANNIEGQAILYQNEFLTLNGKKYYFG
SDSKAVTGWRIINNKKYYFNPNNAIAAIHLCTINNDKYYFSYDGILQNGY
ITIERNNFYFDANNESKMVTGVFKGPNGFEYFAPANTHNNNIEGQAIVYQ
NKFLTLNGKKYYFDNDSKAVTGWQTIDGKKYYFNLNTAEAATGWQTIDGK
KYYFNLNTAEAATGWQTIDGKKYYFNTNTFIASTGYTSINGKHFYFNTDG
IMQIGVFKGPNGFEYFAPANTDANNIEGQAILYQNKFLTLNGKKYYFGSD
SKAVTGLRTIDGKKYYFNTNTAVAVTGWQTINGKKYYFNTNTSIASTGYT
IISGKHFYFNTDGIMQIGVFKGPDGFEYFAPANTDANNIEGQAIRYQNRF
LYLHDNIYYFGNNSKAATGWVTIDGNRYYFEPNTAMGANGYKTIDNKNFY
FRNGLPQIGVFKGSNGFEYFAPANTDANNIEGQAIRYQNRFLHLLGKIYY
FGNNSKAVTGWQTINGKVYYFMPDTAMAAAGGLFEIDGVIYFFGVDGVKA
PGIYG

[0170] SEQ ID NO: 49, STF2.RBD-A2 (D3 deleted flagellin I423A and C-terminal fusion with FULL RECEPTOR BINDING DOMAIN 1812-2710 IN ITALICS. 40 REPEATS).

MAQVINTNSLSLLTQNNLNKSQSALGTAIERLSSGLRINSAKDDAAGQAI
ANRFTANIKGLTQASRNANDGISIAQTTEGALNEINNNLQRVRELAVQSA
NSTNSQSDLDSIQAEITQRLNEIDRVSGQTQFNGVKVLAQDNTLTIQVGA
NDGETIDIDLKQINSQTLGLDSLNVQKAYDVKDTAVTTKAAVVSADAKNA
LIAGGVDATDANGAELVKMSYTDKNGKTIEGGYALKAGDKYYAADYDEAT
GAIKAKTTSYTAADGTTKTAANQLGGVDGKTEVVTIDGKTYNASKAAGHD
FKAQPELAEAAAKTTENPLQKADAALAQVDALRSDLGAVQNRFNSAITNL
GNTVNNLSEARSRIEDSDYATEVSNMSRAQILQQAGTSVLAQANQVPQNV
LSLLAGFKIIDNKTYYYDEDSKLVKGLININNSLFYFDPIEFNLVTGWQT
INGKKYYFDINTGAALTSYKIINGKHFYFNNDGVMQLGVFKGPDGFEYFA
PANTQNNNIEGQAIVYQSKFLTLNGKKYYFDNNSKAVTGWRIINNEKYYF
NPNNAIAAVGLQVIDNNKYYFNPDTAIISKGWQTVNGSRYYFDTDTAIAF
NGYKTIDGKHFYFDSDCVVKIGVFSTSNGFEYFAPANTYNNNIEGQAIVY
QSKFLTLNGKKYYFDNNSKAVTGWQTIDSKKYYFNTNTAEAATGWQTIDG
KKYYFNTNTAEAATGWQTIDGKKYYFNTNTAIASTGYTIINGKHFYFNTD
GIMQIGVFKGPNGFEYFAPANTDANNIEGQAILYQNEFLTLNGKKYYFGS
DSKAVTGWRIINNKKYYFNPNNAIAAIHLCTINNDKYYFSYDGILQNGYI
TIERNNFYFDANNESKMVTGVFKGPNGFEYFAPANTHNNNIEGQAIVYQN
KFLTLNGKKYYFDNDSKAVTGWQTIDGKKYYFNLNTAEAATGWQTIDGKK
YYFNLNTAEAATGWQTIDGKKYYFNTNTFIASTGYTSINGKHFYFNTDGI
MQIGVFKGPNGFEYFAPANTDANNIEGQAILYQNKFLTLNGKKYYFGSDS
KAVTGLRTIDGKKYYFNTNTAVAVTGWQTINGKKYYFNTNTSIASTGYTI
ISGKHFYFNTDGIMQIGVFKGPDGFEYFAPANTDANNIEGQAIRYQNRFL
YLHDNIYYFGNNSKAATGWVTIDGNRYYFEPNTAMGANGYKTIDNKNFYF
RNGLPQIGVFKGSNGFEYFAPANTDANNIEGQAIRYQNRFLHLLGKIYYF
GNNSKAVTGWQTINGKVYYFMPDTAMAAAGGLFEIDGVIYFFGVDGVKAP
GIYG

[0171] SEQ ID NO: 50, STF2.RBD-B2 (flagellin I423A and C-terminal fusion with FULL RECEPTOR BINDING DOMAIN 1814-2366 in italics, 24 repeats).

MAQVINTNSLSLLTQNNLNKSQSALGTAIERLSSGLRINSAKDDAAGQAI
ANRFTANIKGLTQASRNANDGISIAQTTEGALNEINNNLQRVRELAVQSA
NSTNSQSDLDSIQAEITQRLNEIDRVSGQTQFNGVKVLAQDNTLTIQVGA
NDGETIDIDLKQINSQTLGLDSLNVQKAYDVKDTAVTTKAYANNGTTLDV
SGLDDAAIKAATGGTNGTASVTGGAVKFDADNNKYFVTIGGFTGADAAKN
GDYEVNVATDGTVTLAAGATKTTMPAGATTKTEVQELKDTPAVVSADAKN
ALIAGGVDATDANGAELVKMSYTDKNGKTIEGGYALKAGDKYYAADYDEA
TGAIKAKTTSYTAADGTTKTAANQLGGVDGKTEVVTIDGKTYNASKAAGH
DFKAQPELAEAAAKTTENPLQKADAALAQVDALRSDLGAVQNRFNSAITN
LGNTVNNLSEARSRIEDSDYATEVSNMSRAQILQQAGTSVLAQANQVPQN
VLSLLAGLVSLYNEKFYINNFGMMVSGLIYINDSLYYFKPPVNNLITGFV
TVGDDKYYFNPINGGAASIGETIIDDKNYYFNQSGVLQTGVFSTEDGFKY
FAPANTLDENLEGEAIDFTGKLIIDENIYYFDDNYRGAVEWKELDGEMHY
FSPETGKAFKGLNQIGDYKYYFNSDGVMQKGFVSINDNKHYFDDSGVMKV
GYTEIDGKHFYFAENGEMQIGVFNTEDGFKYFAHHNEDLGNEEGEEISYS
GILNFNNKIYYFDDSFTAVVGWKDLEDGSKYYFDEDTAEAYIGLSLINDG
QYYFNDDGIMQVGFVTINDKVFYFSDSGIIESGVQNIDDNYFYIDDNGIV
QIGVFDTSDGYKYFAPANTVNDNIYGQAVEYSGLVRVGEDVYYFGETYTI
ETGWIYDMENESDKYYFNPETKKACKGINLIDDIKYYFDEKGIMRTGLIS
FENNNYYFNENGEMQFGYINIEDKMFYFGEDGVMQIGVFNTPDGFKYFAH
QNTLDENFEGESINYTGWLDLDEKRYYFTDEYIAATGSVIIDGEEYYFDP
DTAQLVISE

[0172] SEQ ID NO: 51, STF2.RBD-B2 (D3 deleted flagellin I423A and C-terminal fusion with FULL RECEPTOR BINDING DOMAIN 1814-2366 in italics, 24 repeats).

MAQVINTNSLSLLTQNNLNKSQSALGTAIERLSSGLRINSAKDDAAGQAI
ANRFTANIKGLTQASRNANDGISIAQTTEGALNEINNNLQRVRELAVQSA
NSTNSQSDLDSIQAEITQRLNEIDRVSGQTQFNGVKVLAQDNTLTIQVGA
NDGETIDIDLKQINSQTLGLDSLNVQKAYDVKDTAVTTKAAVVSADAKNA
LIAGGVDATDANGAELVKMSYTDKNGKTIEGGYALKAGDKYYAADYDEAT
GAIKAKTTSYTAADGTTKTAANQLGGVDGKTEVVTIDGKTYNASKAAGHD
FKAQPELAEAAAKTTENPLQKADAALAQVDALRSDLGAVQNRFNSAITNL
GNTVNNLSEARSRIEDSDYATEVSNMSRAQILQQAGTSVLAQANQVPQNV
LSLLAGLVSLYNEKFYINNFGMMVSGLIYINDSLYYFKPPVNNLITGFVT
VGDDKYYFNPINGGAASIGETIIDDKNYYFNQSGVLQTGVFSTEDGFKYF
APANTLDENLEGEAIDFTGKLIIDENIYYFDDNYRGAVEWKELDGEMHYF
SPETGKAFKGLNQIGDYKYYFNSDGVMQKGFVSINDNKHYFDDSGVMKVG
YTEIDGKHFYFAENGEMQIGVFNTEDGFKYFAHHNEDLGNEEGEEISYSG
ILNFNNKIYYFDDSFTAVVGWKDLEDGSKYYFDEDTAEAYIGLSLINDGQ
YYFNDDGIMQVGFVTINDKVFYFSDSGIIESGVQNIDDNYFYIDDNGIVQ
IGVFDTSDGYKYFAPANTVNDNIYGQAVEYSGLVRVGEDVYYFGETYTIE
TGWIYDMENESDKYYFNPETKKACKGINLIDDIKYYFDEKGIMRTGLISF
ENNNYYFNENGEMQFGYINIEDKMFYFGEDGVMQIGVFNTPDGFKYFAHQ
NTLDENFEGESINYTGWLDLDEKRYYFTDEYIAATGSVIIDGEEYYFDPD
TAQLVISE

[0173] SEQ ID NO: 52, STF2Δ.RBD-A2 (D2 and D3 deleted flagellin I423A and C-terminal fusion with Full length RBD of TcdA in italics)

MAQVINTNSLSLLTQNNLNKSQSALGTAIERLSSGLRINSAKDDAAGQAI
ANRFTANIKGLTQASRNANDGISIAQTTEGALNEINNNLQRVRELAVQSA
NSTNSQSDLDSIQAEITQRLNEIDRVSGQTQFNGVKVLAQDNTLTIQVGA
NDGETIDIDLKQINSQTLGLDSLNVQTTENPLQKADAALAQVDALRSDLG
AVQNRFNSAITNLGNTVNNLSEARSRIEDSDYATEVSNMSRAQILQQAGT
SVLAQANQVPQNVLSLLAGFKIIDNKTYYYDEDSKLVKGLININNSLFYF
DPIEFNLVTGWQTINGKKYYFDINTGAALTSYKIINGKHFYFNNDGVMQL
GVFKGPDGFEYFAPANTQNNNIEGQAIVYQSKFLTLNGKKYYFDNNSKAV
TGWRIINNEKYYFNPNNAIAAVGLQVIDNNKYYFNPDTAIISKGWQTVNG
SRYYFDTDTAIAFNGYKTIDGKHFYFDSDCVVKIGVFSTSNGFEYFAPAN
TYNNNIEGQAIVYQSKFLTLNGKKYYFDNNSKAVTGWQTIDSKKYYFNTN
TAEAATGWQTIDGKKYYFNTNTAEAATGWQTIDGKKYYFNTNTAIASTGY
TIINGKHFYFNTDGIMQIGVFKGPNGFEYFAPANTDANNIEGQAILYQNE
FLTLNGKKYYFGSDSKAVTGWRIINNKKYYFNPNNAIAAIHLCTINNDKY
YFSYDGILQNGYITIERNNFYFDANNESKMVTGVFKGPNGFEYFAPANTH
NNNIEGQAIVYQNKFLTLNGKKYYFDNDSKAVTGWQTIDGKKYYFNLNTA
EAATGWQTIDGKKYYFNLNTAEAATGWQTIDGKKYYFNTNTFIASTGYTS
INGKHFYFNTDGIMQIGVFKGPNGFEYFAPANTDANNIEGQAILYQNKFL
TLNGKKYYFGSDSKAVTGLRTIDGKKYYFNTNTAVAVTGWQTINGKKYYF
NTNTSIASTGYTIISGKHFYFNTDGIMQIGVFKGPDGFEYFAPANTDANN
IEGQAIRYQNRFLYLHDNIYYFGNNSKAATGWVTIDGNRYYFEPNTAMGA
NGYKTIDNKNFYFRNGLPQIGVFKGSNGFEYFAPANTDANNIEGQAIRYQ
NRFLHLLGKIYYFGNNSKAVTGWQTINGKVYYFMPDTAMAAAGGLFEIDG
VIYFFGVDGVKAPGIYG

[0174] SEQ ID NO: 53, STF2Δ.RBD-B2 (D2 and D3 deleted flagellin I423A and C-terminal fusion with Full length RBD of TcdB in italics)

MAQVINTNSLSLLTQNNLNKSQSALGTAIERLSSGLRINSAKDDAAGQAI
ANRFTANIKGLTQASRNANDGISIAQTTEGALNEINNNLQRVRELAVQSA
NSTNSQSDLDSIQAEITQRLNEIDRVSGQTQFNGVKVLAQDNTLTIQVGA
NDGETIDIDLKQINSQTLGLDSLNVQTTENPLQKADAALAQVDALRSDLG
AVQNRFNSAITNLGNTVNNLSEARSRIEDSDYATEVSNMSRAQILQQAGT
SVLAQANQVPQNVLSLLAGIVSLYNEKFYINNFGMMVSGLIYINDSLYYF
KPPVNNLITGFVTVGDDKYYFNPINGGAASIGETIIDDKNYYFNQSGVLQ
TGVFSTEDGFKYFAPANTLDENLEGEAIDFTGKLIIDENIYYFDDNYRGA
VEWKELDGEMHYFSPETGKAFKGLNQIGDYKYYFNSDGVMQKGFVSINDN
KHYFDDSGVMKVGYTEIDGKHFYFAENGEMQIGVFNTEDGFKYFAHHNED
LGNEEGEEISYSGILNFNNKIYYFDDSFTAVVGWKDLEDGSKYYFDEDTA
EAYIGLSLINDGQYYFNDDGIMQVGFVTINDKVFYFSDSGIIESGVQNID
DNYFYIDDNGIVQIGVFDTSDGYKYFAPANTVNDNIYGQAVEYSGLVRVG
EDVYYFGETYTIETGWIYDMENESDKYYFNPETKKACKGINLIDDIKYYF
DEKGIMRTGLISFENNNYYFNENGEMQFGYINIEDKMFYFGEDGVMQIGV
FNTPDGFKYFAHQNTLDENFEGESINYTGWLDLDEKRYYFTDEYIAATGS
VIIDGEEYYFDPDTAQLVISE

[0175] SEQ ID NO: 57, TcdA N-terminal GTD residues 2-545, D269N+D285N (of full length TcdA, SEQ ID NO: 15) to abolish enzymatic activity

SLISKEELIKLAYSIRPRENEYKTILTNLDEYNKLTTNNNENKYLQLKKL
NESIDVFMNKYKTSSRNRALSNLKKDILKEVILIKNSNTSPVEKNLHFVW
IGGEVSDIALEYIKQWADINAEYNIKLWYDSEAFLVNTLKKAIVESSTTE
ALQLLEEEIQNPQFDNMKFYKKRMEFIYDRQKRFINYYKSQINKPTVPTI
DDIIKSHLVSEYNRDETVLESYRTNSLRKINSNHGIDIRANSLFTEQELL
NIYSQELLNRGNLAAASNIVRLLALKNFGGVYLNVDMLPGIHSDLFKTIS
RPSSIGLDRWEMIKLEAIMKYKKYINNYTSENFDKLDQQLKDNFKLIIES
KSEKSEIFSKLENLNVSDLEIKIAFALGSVINQALISKQGSYLTNLVIEQ
VKNRYQFLNQHLNPAIESDNNFTDTTKIFHDSLFNSATAENSMFLTKIAP
YLQVGFMPEARSTISLSGPGAYASAYYDFINLQENTIEKTLKASDLIEFK
FPENNLSQLTEQEINSLWSFDQASAKYQFEKYVRDYTGGSLSED

[0176] SEQ ID NO: 59, TcdA CPD, D589N+H655A+C700S (residues 543-808 of full length TcdA, SEQ ID NO: 15) to abolish enzymatic activity

SEDNGVDFNKNTALDKNYLLNNKIPSNNVEEAGSKNYVHYIIQLQGNDIS
YEATCNLFSKNPKNSIIIQRNMNESAKSYFLSDDGESILELNKYRIPERL
KNKEKVKVTFIGAGKDEFNTSEFARLSVDSLSNEISSFLDTIKLDISPKN
VEVNLLGSNMFSYDFNVEETYPGKLLLSIMDKITSTLPDVNKNSITIGAN
QYEVRINSEGRKELLAHSGKWINKEEAIMSDLSSKEYIFFDSIDNKLKAK
SKNIPGLASISEDIKT

[0177] SEQ ID NO: 61, C. difficile, TcdA Receptor Binding Domain or RBD-A1 with 14 repeats residues 2387-2707 (of full length TcdA, SEQ ID NO: 15)

ASTGYTSINGKHFYFNTDGIMQIGVFKGPNGFEYFAPANTDANNIEGQAI
LYQNKFLTLNGKKYYFGSDSKAVTGLRTIDGKKYYFNTNTAVAVTGWQTI
NGKKYYFNTNTSIASTGYTIISGKHFYFNTDGIMQIGVFKGPDGFEYFAP
ANTDANNIEGQAIRYQNRFLYLHDNIYYFGNNSKAATGWVTIDGNRYYFE
PNTAMGANGYKTIDNKNFYFRNGLPQIGVFKGSNGFEYFAPANTDANNIE
GQAIRYQNRFLHLLGKIYYFGNNSKAVTGWQTINGKVYYFMPDTAMAAAG
GLFEIDGVIYFFGVDGVKAPG

[0178] SEQ ID NO: 62 Clostridium difficile f1 fragment of TcdA RBD residues 2581-2710 (of full length TcdA, SEQ ID NO: 15) with single underlined flexible linkers

GGGGGNRYYFEPNTAMGANGYKTIDNKNFYFRNGLPQIGVFKGSNGFEYF
APANTDANNIEGQAIRYQNRFLHLLGKIYYFGNNSKAVTGWQTINGKVYY
FMPDTAMAAAGGLFEIDGVIYFFGVDGVKAPGIYGGGGG

[0179] SEQ ID NO: 64, TcdB N-terminal GTD residues 2-546, D270N+D286N (of full length TcdB, SEQ ID NO: 16) to abolish enzymatic activity

SLVNRKQLEKMANVRFRTQEDEYVAILDALEEYHNMSENTVVEKYLKLKD
INSLTDIYIDTYKKSGRNKALKKFKEYLVTEVLELKNNNLTPVEKNLHFV
WIGGQINDTAINYINQWKDVNSDYNVNVFYDSNAFLINTLKKTVVESAIN
DTLESFRENLNDPRFDYNKFFRKRMEIIYDKQKNFINYYKAQREENPELI
IDDIVKTYLSNEYSKEIDELNTYIEESLNKITQNSGNDVRNFEEFKNGES
FNLYEQELVERWNLAAASNILRISALKEIGGMYLNVDMLPGIQPDLFESI
EKPSSVTVDFWEMTKLEAIMKYKEYIPEYTSEHFDMLDEEVQSSFESVLA
SKSDKSEIFSSLGDMEASPLEVKIAFNSKGIINQGLISVKDSYCSNLIVK
QIENRYKILNNSLNPAISEDNDFNTTTNTFIDSIMAEANADNGRFMMELG
KYLRVGFFPDVKTTINLSGPEAYAAAYQDLLMFKEGSMNIHLIEADLRNF
EISKTNISQSTEQEMASLWSFDDARAKAQFEEYKRNYFEGSLGED

[0180] SEQ ID NO: 66, TcdB CPD residues 544-806, D587N+H653A+C698S (of full length TcdB, SEQ ID NO: 16) to abolish enzymatic activity

GEDDNLDFSQNIVVDKEYLLEKISSLARSSERGYIHYIVQLQGNKISYEA
ACNLFAKTPYDSVLFQKNIEDSEIAYYYNPGDGEIQEIDKYKIPSIISDR
PKIKLTFIGAGKDEFNTDIFAGFDVDSLSTEIEAAIDLAKEDISPKSIEI
NLLGSNMFSYSINVEETYPGKLLLKVKDKISELMPSISQDSIIVSANQYE
VRINSEGRRELLDHSGEWINKEESIIKDISSKEYISFNPKENKITVKSKN
LPELSTLLQEIRN

[0181] SEQ ID NO: 68, C. difficile, TcdB Receptor Binding Domain or RBD-B1 with 16 repeats residues 2005-2366 (of full length TcdB, SEQ ID NO: 16)

MKVGYTEIDGKHFYFAENGEMQIGVFNTEDGFKYFAHHNEDLGNEEGEEI
SYSGILNFNNKIYYFDDSFTAVVGWKDLEDGSKYYFDEDTAEAYIGLSLI
NDGQYYFNDDGIMQVGFVTINDKVFYFSDSGIIESGVQNIDDNYFYIDDN
GIVQIGVFDTSDGYKYFAPANTVNDNIYGQAVEYSGLVRVGEDVYYFGET
YTIETGWIYDMENESDKYYFNPETKKACKGINLIDDIKYYFDEKGIMRTG
LISFENNNYYFNENGEMQFGYINIEDKMFYFGEDGVMQIGVFNTPDGFKY
FAHQNTLDENFEGESINYTGWLDLDEKRYYFTDEYIAATGSVIIDGEEYY
FDPDTAQLVISE

[0182] SEQ ID NO: 69 Clostridium difficile f1 fragment of TcdB RBD residues 2221-2366 (of full length TcdB, SEQ ID NO: 16) with single underlined flexible linkers

GGGGGKYYFNPETKKACKGINLIDDIKYYFDEKGIMRTGLISFENNNYYF
NENGEMQFGYINIEDKMFYFGEDGVMQIGVFNTPDGFKYFAHQNTLDENF
EGESINYTGWLDLDEKRYYFTDEYIAATGSVIIDGEEYYFDPDTAQLVIS
EGGGG

[0183] SEQ ID NO: 75, SFT2.cdtA (Flagellin is fused with a cdtA fragment (SEQ ID NO: 101). The cdtA signal peptide removed and S388Y, E427A and E430A are introduced to abolish enzymatic activity compared to SEQ ID NO: 73; C. diff. antigen is double underlined)

MAQVINTNSLSLLTQNNLNKSQSALGTAIERLSSGLRINSAKDDAAGQAI
ANRFTANIKGLTQASRNANDGISIAQTTEGALNEINNNLQRVRELAVQSA
NSTNSQSDLDSIQAEITQRLNEIDRVSGQTQFNGVKVLAQDNTLTIQVGA
NDGETIDIDLKQINSQTLGLDSLNVQKAYDVKDTAVTTKAYANNGTTLDV
SGLDDAAIKAATGGTNGTASVTGGAVKFDADNNKYFVTIGGFTGADAAKN
GDYEVNVATDGTVTLAAGATKTTMPAGATTKTEVQELKDTPAVVSADAKN
ALIAGGVDATDANGAELVKMSYTDKNGKTIEGGYALKAGDKYYAADYDEA
TGAIKAKTTSYTAADGTTKTAANQLGGVDGKTEVVTIDGKTYNASKAAGH
DFKAQPELAEAAAKTTENPLQKIDAALAQVDALRSDLGAVQNRFNSAITN
LGNTVNNLSEARSRIEDSDYATEVSNMSRAQILQQAGTSVLAQANQVPQN
VLSLLAVCNTTYKAPIERPEDFLKDKEKAKEWERKEAERIEQKLERSEKE
ALESYKKDSVEISKYSQTRNYFYDYQIEANSREKEYKELRNAISKNKIDK
PMYVYYFESPEKFAFNKVIRTENQNEISLEKFNEFKETIQNKLFKQDGFK
DISLYEPGKGDEKPTPLLMHLKLPRNTGMLPYTNTNNVSTLIEQGYSIKI
DKIVRIVIDGKHYIKAEASVVSSLDFKDDVSKGDSWGKANYNDWSNKLTP
NELADVNDYMRGGYTAINNYLISNGPVVNPNPELDSKITNIENALKREPI
PTNLTVYRRSGPQEFGLTLTSPEYDFNKLENIDAFKSKWEGQALSYPNFI
YTSIGSVNMSAFAKRKIVLRITIPKGSPGAYLSAIPGYAGAYAVLLNHGS
KFKINKIDSYKDGTITKLIVDATLIP

[0184] SEQ ID NO: 76, SFT2.ED (Flagellin is fused with cdtA enzymatic domain (SEQ ID ON: 102). The mutations of S388Y, E427A and E430A are introduced to abolish enzymatic activity compared to SEQ ID NO: 73; C. diff. antigen is double underlined)

MAQVINTNSLSLLTQNNLNKSQSALGTAIERLSSGLRINSAKDDAAGQAI
ANRFTANIKGLTQASRNANDGISIAQTTEGALNEINNNLQRVRELAVQSA
NSTNSQSDLDSIQAEITQRLNEIDRVSGQTQFNGVKVLAQDNTLTIQVGA
NDGETIDIDLKQINSQTLGLDSLNVQKAYDVKDTAVTTKAYANNGTTLDV
SGLDDAAIKAATGGTNGTASVTGGAVKFDADNNKYFVTIGGFTGADAAKN
GDYEVNVATDGTVTLAAGATKTTMPAGATTKTEVQELKDTPAVVSADAKN
ALIAGGVDATDANGAELVKMSYTDKNGKTIEGGYALKAGDKYYAADYDEA
TGAIKAKTTSYTAADGTTKTAANQLGGVDGKTEVVTIDGKTYNASKAAGH
DFKAQPELAEAAAKTTENPLQKIDAALAQVDALRSDLGAVQNRFNSAITN
LGNTVNNLSEARSRIEDSDYATEVSNMSRAQILQQAGTSVLAQANQVPQN
VLSLLAERKEAERIEQKLERSEKEALESYKKDSVEISKYSQTRNYFYDYQ
IEANSREKEYKELRNAISKNKIDKPMYVYYFESPEKFAFNKVIRTENQNE
ISLEKFNEFKETIQNKLFKQDGFKDISLYEPGKGDEKPTPLLMHLKLPRN
TGMLPYTNTNNVSTLIEQGYSIKIDKIVRIVIDGKHYIKAEASVVSSLDF
KDDVSKGDSWGKANYNDWSNKLTPNELADVNDYMRGGYTAINNYLISNGP
VVNPNPELDSKITNIENALKREPIPTNLTVYRRSGPQEFGLTLTSPEYDF
NKLENIDAFKSKWEGQALSYPNFIYTSIGSVNMSAFAKRKIVLRITIPKG
SPGAYLSAIPGYAGAYAVLLNHGSKFKINKIDSYKDGTITKLIVDATLIP

[0185] SEQ ID NO: 77, SFT2.cdtB (Flagellin is fused with cdtB without signal peptide (SEQ ID NO: 103). The K209 is mutated to A209 (of full length cdtB, SEQ ID NO: 74) to change the protease site so that cdtB remains as precursor protein, deficient of pore forming activity; C. diff. antigen is double underlined)

MAQVINTNSLSLLTQNNLNKSQSALGTAIERLSSGLRINSAKDDAAGQAI
ANRFTANIKGLTQASRNANDGISIAQTTEGALNEINNNLQRVRELAVQSA
NSTNSQSDLDSIQAEITQRLNEIDRVSGQTQFNGVKVLAQDNTLTIQVGA
NDGETIDIDLKQINSQTLGLDSLNVQKAYDVKDTAVTTKAYANNGTTLDV
SGLDDAAIKAATGGTNGTASVTGGAVKFDADNNKYFVTIGGFTGADAAKN
GDYEVNVATDGTVTLAAGATKTTMPAGATTKTEVQELKDTPAVVSADAKN
ALIAGGVDATDANGAELVKMSYTDKNGKTIEGGYALKAGDKYYAADYDEA
TGAIKAKTTSYTAADGTTKTAANQLGGVDGKTEVVTIDGKTYNASKAAGH
DFKAQPELAEAAAKTTENPLQKIDAALAQVDALRSDLGAVQNRFNSAITN
LGNTVNNLSEARSRIEDSDYATEVSNMSRAQILQQAGTSVLAQANQVPQN
VLSLLAQTSTSNHSNKKKEIVNEDILPNNGLMGYYFTDEHFKDLKLMAPI
KDGNLKFEEKKVDKLLDKDKSDVKSIRWTGRIIPSKDGEYTLSTDRDDVL
MQVNTESTISNTLKVNMKKGKEYKVRIELQDKNLGSIDNLSSPNLYWELD
GMKKIIPEENLFLRDYSNIEKDDPFIPNNNFFDPALMSDWEDEDLDTDND
NIPDSYERNGYTIKDLIAVKWEDSFAEQGYKKYVSNYLESNTAGDPYTDY
EKASGSFDKAIKTEARDPLVAAYPIVGVGMEKLIISTNEHASTDQGKTVS
RATTNSKTESNTAGVSVNVGYQNGFTANVTTNYSHTTDNSTAVQDSNGES
WNTGLSINKGESAYINANVRYYNTGTAPMYKVTPTTNLVLDGDTLSTIKA
QENQIGNNLSPGDTYPKKGLSPLALNTMDQFSSRLIPINYDQLKKLDAGK
QIKLETTQVSGNFGTKNSSGQIVTEGNSWSDYISQIDSISASIILDTENE
SYERRVTAKNLQDPEDKTPELTIGEAIEKAFGATKKDGLLYFNDIPIDES
CVELIFDDNTANKIKDSLKTLSDKKIYNVKLERGMNILIKTPTYFTNFDD
YNNYPSTWSNVNTTNQDGLQGSANKLNGETKIKIPMSELKPYKRYVFSGY
SKDPLTSNSIIVKIKAKEEKTDYLVPEQGYTKFSYEFETTEKDSSNIEIT
LIGSGTTYLDNLSITELSSTPEILDEPEVKIPTDQEIMDAHKIYFADLNF
NPSTGNTYINGMYFAPTQTNKEALDYIQKYRVEATLQYSGFKDIGTKDKE
MRNYLGDPNQPKTNYVNLRSYFTGGENIMTYKKLRIYAITPDDRELLVLS
VD

### EXEMPLIFICATION

[0186] Toxins A and B of C. difficile can cause cell disruption and death and lead to diarrhea, colitis and sepsis. Toxins A and B have can be structural defined by domains that may be susceptible to neutralization by antibodies (FIGS. 1A and 1B). These domains are the Receptor Binding Domain (RBD), Catalytic Domain (CD), which includes the glucosyl-transferase (GT) domain, the cysteine-protease (CP) domain, and the transmembrane (TL) domain. Fusion proteins that include flagellin and the RBD domains of toxin A and B were generated. Toxins A and B were from the index strain ATCC 43255. Fusion proteins were generated in two different formats: the “R3′.2x” format, in which one antigenic domain replaces the D3 domain of flagellin (between residues 193 and 194 of SEQ ID NO: 96) and a second is fused to the C-terminus; and the C-terminal fusion format in which an antigenic domain is fused to the C-terminus of full length flagellin (SEQ ID NO: 54). Fusion proteins were evaluated in in vitro assays and a mouse immunogenicity model with toxin neutralization being one of the primary readouts.

[0187] Example 1: R3′.2x and C-terminal flagellin fusion proteins utilizing Receptor Binding Domains (RBD) of Toxin A or B are antigenic, retain TLR5 activity and generate Toxin neutralizing antibodies in a mouse model.

### Methods

### Cloning of Fusion Proteins

[0188] Fusion proteins were generated employing standard molecular cloning techniques well known and established. DNA encoding elements of the Receptor Binding Domains (RBD) based on Toxins A (SEQ ID NO: 60) and B (SEQ ID NO: 67) were synthesized by an outside vendor (Genewiz Inc.). Fusion protein HL821 (SEQ ID NO: 9) was generated by inserting a small fragment of the C-terminal substrate binding domain of TcdA (f1 fragment, SEQ ID NO: 62) between residues 193 and 194 of R3′ flagellin (SEQ ID NO: 96), and a second antigen containing 14 repeat elements of RBD-A1 (SEQ ID NO: 61) fused to the C-terminus of R3′ flagellin (SEQ ID NO: 96). Fusion protein HL822 (SEQ ID NO: 10) was generated by inserting a small fragment of the C-terminal substrate binding domain of TcdB (f1 fragment, SEQ ID NO: 69) between residues 193 and 194 of R3′ flagellin (SEQ ID NO: 96), and a second antigen containing 16 repeat elements of RBD-B1 (SEQ ID NO: 68) was fused to the C-terminus of R3′ flagellin (SEQ ID NO: 96). Another antigen included the entire (also referred to herein as “complete”) RBD fused to the C-terminus of flagellin. For example, complete RBD-A2 (SEQ ID NO: 60) corresponding to amino acid residues 1812-2710 of TcdA (SEQ ID NO: 15) was used to generate the fusion protein referred to as HL928 (SEQ ID NO: 25), and complete RBD-B2 (SEQ ID NO: 67) corresponding to amino acid residues 1814-2366 of TcdB (SEQ ID NO: 16) was used to generate the fusion protein referred to as HL929 (SEQ ID NO: 26).

[0189] The flagellin sequence of S. typhimurium (SEQ ID NO: 96 for R3′.2x format or SEQ ID NO: 54 for C-terminal fusion format), and C. difficile RBD domains were amplified separately by primary PCR, and fused together by secondary PCR. The final PCR product was digested with NdeI and XhoI restriction enzymes and ligated to the pET24a plasmid. The recombinant DNA sequences were confirmed by sequencing. Plasmid with DNA constructs were transformed into E. coli BLR DE3 strain for expression.

### Protein Purification

[0190] Cells were cultured and protein production was induced using IPTG using well established techniques. After further culture, cell paste was prepared and lysed. Protein was refolded by rapid dilution and purified via standard methods of column chromatography.

### Fusion Protein Testing Strategy

[0191] In order to assess the antigenicity and immunogenicity of flagellin fusion protein that include C. difficile antigens, both in vitro and in vivo tests were performed. The in vitro tests were of three types: Capture ELISA, in vitro TLR5 and TLR5-Fc competition. The in vivo study was performed in mice and lead to two readouts: Toxin A and B specific serum IgG by ELISA and Toxin A serum neutralization using the CT26 cell line.

[0192] Three formats of flagellin fusion were produced. The first fusion protein was an R3′.2x format fusion protein in which the RBD subdomain f1 (also referred to as “f1 fragment”) was inserted into R3′ flagellin (SEQ ID NO: 96) and another RBD domain is present at the C-terminus. For example, for Toxin A, the f1 fragment (SEQ ID NO: 62) and the RBD-A1 domain (SEQ ID NO: 61) were used to generate fusion protein HL821 (SEQ ID NO: 9). For Toxin B, the f1 fragment (SEQ ID NO: 69) and the RBD-B1 domain (SEQ ID NO: 8) were used to generate fusion protein HL822 (SEQ ID NO: 10). The second format is a C-terminal fusion with the entirety of the RBD domain from either Toxin A (referred to as HL928, SEQ ID NO: 25) or Toxin B (referred to as HL929, SEQ ID NO: 26), respectively. For example, the entirety of the RBD-A2 domain (SEQ ID NO: 60 corresponding to amino acid residues 1812-2710 of TcdA (SEQ ID NO: 15)) was used to generate fusion protein as HL928 (SEQ ID NO: 25). The entirety of the RBD-B2 domain (SEQ ID NO: 60 corresponding to amino acid residues 1814-2366 of TcdB (SEQ ID NO: 16)) was used to generate fusion protein as HL929 (SEQ ID NO: 26). Fusion proteins were also generated by fusion of Toxin A RBD to the carboxy terminal amino acid of flagellin lacking domains 2 and 3 (STF2Δ) to generate SEQ ID NO: 27 and fusion of Toxin B RBD to the carboxy terminal amino acid of flagellin lacking domains 2 and 3 (STF2Δ) to generate SEQ ID NO: 28.

### Capture ELISA

[0193] For the Capture ELISA, a “sandwich” format was developed in which commercial polyclonal serum against either Toxin A or B (egg IgY from Gallus Immunotech) was coated on the plate. After washing and blocking (Superblock Tween 20, ThermoFisher), serially diluted fusion proteins were added to the plate and incubated for one hour. After another wash, fusion proteins were bound by polyclonal goat anti-flagellin serum (Covance Research Products) and detected with rabbit anti-goat IgG conjugated to HRP (Jackson ImmunoResearch). The plates were developed with TMB (ThermoFisher) and stopped with 1 M H2SO4 (J. T. Baker). Plates were read at 450 nm on a Spectramax reader and analyzed using Softmax 5.4 (Molecular Devices).

In vitro TLR5 assay

[0194] The in vitro TLR5 assay used human TLR5 HEK293 cells to measure dose-dependent IL-8 release. Cells were plated at 1×10⁴ cells per well and exposed to serially diluted fusion proteins for about 16 to about 20 hours. At that point the supernatant was tested for IL-8 using an ELISA, including a standard curve (BD Bioscience). Fusion proteins that include C. difficile antigens were compared to influenza HA fusion proteins with a similar format (e.g., R32x or C-terminal fusions). As there is a consistent discontinuity in the shape of the resulting dose response curves, determining an exact midpoint is not possible. Therefore, the overall curve appearance including upper and lower asymptotes, the slope in the dynamic part of the curve, and the approximate mid-point, are all used to compare vaccines with each other and controls.

### TLR5-Fc Competition Assay

[0195] The TR5-Fc competition ELISA used a soluble form of mouse TLR5 expressed as a fusion protein with the Fc portion of mouse IgG (R&D Systems). In the assay, serial dilutions of fusion proteins were mixed with a constant amount of TLR5-Fc and incubated for about one hour. The mix was then added to a plate coated with flagellin. TLR5-Fc not bound to the vaccine was captured on the plate and detected using rabbit anti-mouse IgG HRP, TMB and H2SO4. Different fusion proteins were compared to each other and to controls using the maximum and mid-point of the curves.

In vivo Studies: Mouse Serum ELISA and Toxin A Neutralization Test

[0196] In vivo immunogenicity studies were carried out using specific pathogen free female BALB/c mice obtained from Charles River. The in-life phase took place in a barrier colony. Mice (5 per group) were immunized with 4 μg, 10 μg or 25 μg of each fusion protein s.c. on days 0, 21, and 42 and bled on days 0, 35 and 56. As positive controls, groups of mice were injected with either Toxoid A or B (about 10 μg, List Biological Laboratories), in Montanide 720 VG adjuvant (Seppic). Chemical treatment, including formaldehyde treatment, can be used to inactivate Toxins A and B to make the respective Toxoids. Formaldehyde treatment destroys the enzymatic activity of the GTD. The resulting Toxoids can be used safely, for example, to coat ELISA plates or as control antigens for mouse immunization. A negative control group received formulation buffer (F147) only. Sera were evaluated by ELISA and in a cell-based neutralization test. For the ELISA, plates were coated with either Toxoid A or B (List Biological Laboratories). After washing and blocking plates, were exposed to serial dilutions of serum (1:5-fold steps starting at 1:50) for one hour. After washing, the remaining antibody was detected with rabbit anti-mouse IgG conjugated to HRP (Jackson ImmunoResearch). The plates were developed with TMB (ThermoFisher) and stopped with 1 M H2SO4 (J.T. Baker). Plates were read at 450 nm on a Spectramax reader and analyzed using Softmax 5.4 (Molecular Devices). OD values were converted to Toxoid-specific IgG using a standard curve of polyclonal mouse IgG run on the same plate which was fit using a 4-parameter logistic function.

[0197] For the neutralization method, CT26 mouse colon cells were treated with a cytostatic dose (100 ng/mL) of Toxin A (List Biological Laboratories) with or without dilutions of serum from vaccinated or control mice for 72 hours. Assays were performed at Eurofins Panlabs. Cell viability was detected by measuring ATP from lysed cells using a luciferase assay (Cyto-glo, Promega). The assay solution contains a cell lysis agent, which releases ATP from cells, luciferin and luciferase. Light units, read on a 96-well luminometer, are proportional to ATP released from live cells. Results are expressed either as relative light units (RLU) or as percent cell growth compared to controls: cells without toxin or serum (100% growth), and cells with toxin alone (0% growth). Chicken egg polyclonal anti-Toxin A antibody (Gallus Immunotech) was used as a positive neutralization control. This is the same antibody used in the Capture ELISA.

### Results

### Capture ELISA

[0198] A method was established to measure the antigenicity of each fusion protein using antibodies both to the Toxin component and flagellin moiety (sandwich format). In this method, serial dilutions of fusion proteins were quantified and compared to other fusion proteins by the upper asymptote (D value of a 4-parameter logistic fit), or the curve midpoint (C value). As this method is specific for flagellin/C. difficile fusion vaccines, there is no way to compare to other controls such as Toxoids A or B or other flagellin fusion vaccines with different disease antigens, such as influenza HA. An example is shown in FIG. 6, in which the antigenicity of a fusion protein in the R3′.2x format (referred to as HL821, SEQ ID NO: 9) and a fusion protein in the C-terminal format (referred to as HL928, SEQ ID NO: 25) of Toxin A RBD domains are compared. The results indicate that the C-terminal fusion protein, which has a longer stretch of RBD sequence, has a higher upper plateau than the R3′.2x version. This is consistent with a higher degree of binding by the polyclonal anti-Toxin A serum bound to the plate. However, that the midpoint values are quite close (about 0.052 μg/mL for HL928 vs. about 0.044 μg/mL for HL821). This indicates that the two fusion proteins have a similar degree of potency: that is the presence of both Toxin A and flagellin epitopes is similar on a μg/mL basis.

[0199] Results comparable to those of Toxin A were obtained for the Toxin B fusion proteins, as shown in FIG. 7. Fusion proteins in both R3′.2x and C-terminal formats show good dose response curves, with similar curve midpoints (about 0.044 and about 0.052 μg/mL respectively) indicating that both the Toxin B domain and the flagellin are bound by polyclonal antibodies in the same molecule. As with the fusion proteins that include Toxin A antigens, the C-terminal format fusion protein, such as the fusion protein referred to as HL929 (SEQ ID NO: 26), has a stronger maximum signal than the R3′.2x format fusion protein referred to as HL822 (SEQ ID NO: 10), consistent with the longer RBD domain being captured to a greater extent by the plate bound poly-clonal anti-Toxin antibody. As discussed above, the RBD portions used in HL822 (SEQ ID NO: 10) were the f1 fragment (SEQ ID NO: 69) and the RBD-B1 domain (SEQ ID NO: 68) while the RBD portion used in HL929 (SEQ ID NO: 26) was the entire RBD-B2 domain (SEQ ID NO: 67).

In vitro TLR5

[0200] The in vitro TLR5 test is used to demonstrate that the innate stimulation function of the flagellin moiety of the fusion vaccine is intact. Fusion proteins of the invention activate TLR5. The assay has been used extensively to assess fusion proteins that include flagellin, as described, for example in U.S. application Ser. Nos. 11/714,684 and 11/714,873. Fusion proteins that include C. difficile antigens were evaluated for in vitro TLR5 activity. The R3.2x format fusion proteins for influenza A/California/07/2009 (R3.2x CA07, referred to as HL186, SEQ ID NO: 78) was used as a control for the R3′.2x format C. difficile fusion proteins referred to as HL821 (SEQ ID NO: 9, Toxin A) and HL822 (SEQ ID NO: 10, Toxin B). The results, shown in FIG. 8, indicate that the Toxin A fusion protein referred to as HL821 (SEQ ID NO: 9) behaves very similarly to fusion proteins that include flagellin and influenza proteins (referred to as R3.2x CA07, SEQ ID NO: 78), in terms of the IL-8 dose response curve. The R3.2x CA07 fusion protein (SEQ ID NO: 78) has been shown to be active in clinical trials, inducing strong neutralizing titers to the matched influenza strain. The Toxin A fusion protein curve includes the presence of a discontinuity between about 10 and about 100 ng/mL, which is characteristic of active flagellin molecules in the assay. The lower half of the curve for the Toxin B fusion protein (referred to as HL822, SEQ ID NO: 10) is similar to that of the Toxin A and the influenza fusion proteins, but the maximum IL-8 is about half of the other two.

[0201] The C-terminal formats of fusion proteins that C. difficile RBD antigens for Toxins A and B were also evaluated in the in vitro TLR5 assay, in this case compared to the C-terminal influenza fusion protein that includes an antigen of A/California/07/2009 (referred to as C-term CA07, HL184, SEQ ID NO: 79). The results, shown in FIG. 9, indicate that both Toxin A and B fusion proteins are active, but are less potent than the fusion proteins of flagellin that include influenza antigens. The fusion protein that include a Toxin A antigen (referred to as HL928, SEQ ID NO: 25) follows a similar shaped curve, but with a lower slope and peak IL-8 values than the fusion protein with an influenza antigen. The fusion protein that includes a Toxin B antigen (referred to as HL929, SEQ ID NO: 26) has a similar slope to the fusion protein that includes an influenza antigen at the lower part of the curve, but like the fusion protein in the R3′.2x format that includes a Toxin B antigen, plateaus at a much lower peak IL-8 level than either the influenza fusion protein or the Toxin A fusion protein (referred to as HL928, SEQ ID NO: 25).

### TLR5-Fc Competition Assay

[0202] Further evaluation of the TLR5 binding properties of the flagellin moiety of the fusion proteins was performed using a competition ELISA format. In this assay, serial dilutions of fusion proteins were mixed with a soluble form of TLR5 genetically fused with the Fc portion of mouse IgG (TLR5-Fc, R&D Systems). After incubation, this mixture was then added to a plate precoated with flagellin. Soluble TLR5-Fc still bound to the fusion proteins was washed away in the next step while free TLR5-Fc bound the flagellin on the plate and was subsequently detected with rabbit anti-mouse IgG conjugated to HRP, TMB and H2SO4. In this assay, the TLR5-binding potency of each fusion protein was determined by the maximum TLR5-Fc signal and the midpoint of the curve (C value of a 4 parameter curve fit). As the assay is in a competition format, the lower the mid-point, the stronger the binding of a given fusion protein has to TLR5.

[0203] In the first experiment, the R3′.2x formats of C. difficile fusion proteins were again compared to fusion proteins that include influenza R3.2x HA CA07. The results, shown in FIG. 10, demonstrate that the Toxin A fusion protein (referred to as HL821, SEQ ID NO: 9) has a curve parallel to that of the R3.2x CA07 (SEQ ID NO: 78) fusion protein, although it is somewhat more potent. Consistent with the in vitro TLR5 assay, however, while the Toxin B fusion protein (referred to as HL822, SEQ ID NO: 10) still binds TLR5-Fc, it has a much shallower curve and a lower potency than either the Toxin A fusion protein or the HA CA07 fusion protein control.

[0204] In the second experiment, the C-terminal C. difficile fusion proteins were compared to the same format of fusion proteins that include an influenza HA CA07 antigen (SEQ ID NO: 79). The results, shown in FIG. 11, demonstrate that fusion proteins that include Toxin A (referred to as HL928, SEQ ID NO: 25) and Toxin B (referred to as HL929, SEQ ID NO: 26) have similarly shaped curves as the fusion protein with an influenza antigen, but with higher potency. These results are different than that seen with the in vitro TLR5 assay in which the IL-8 release from the C-terminal C. difficile fusion proteins is lower than that of the influenza control.

### Mouse Serum ELISA

[0205] The immunogenicity of fusion proteins that include C. difficile antigens was evaluated in the BALB/c mouse model. Different doses (4 μg, 10 μg and 25 μg) of R3′.2x and C-terminal formats of Toxins A and B were used to immunize mice s.c. on days 0, 21 and 42 (prime and 2 boosts). Groups injected with fusion proteins that include Toxoids A or B (about 10 lig each) in Montanide 720 VG adjuvant were included as positive controls. A group which received formulation buffer (F 147) was included as a negative control. In order to assess antibody levels to the matched Toxoids, mice were bled on days 20 (post-prime), 35 (post-boost 1) and 56 (post-boost 2) and sera were evaluated in an ELISA. In this assay, sera were serially diluted 1:5 fold, starting at 1:50 and exposed to Toxoid-coated plates. Bound antibody was detected with rabbit anti-mouse IgG conjugated to HRP, TMB and H₂SO₄. OD values of bound antibody were converted to Toxin-specific μg/mL by interpolation against a standard curve of polyclonal mouse IgG run on each plate. Post-prime IgG results are shown in FIGS. 12A and 12B. Mice that received buffer only (F147) had only background levels of antibody (about <1 μg/mL) while nearly all mice immunized with either the R3′.2x (referred to as HL821, SEQ ID NO: 9) or C-terminal (referred to as HL928, SEQ ID NO: 25) formats of Toxin A fusion proteins (FIG. 12A) had levels about ≧1 μg/mL with some mice greater than about 10 μg/mL. There was no significant difference between R3′.2x and C-terminal formats compared at the same dose level. For both formats lower levels of antibody were observed between 4 and 10 μg groups, but no difference was observed between 10 and 25 μg groups indicating a dose plateau. The fusion proteins had higher IgG levels than the Toxoid A in adjuvant control.

[0206] In the case of fusion proteins that include toxin B antigens (FIG. 12B), higher peak IgG levels were observed than fusion proteins with toxin A (referred to as HL822, about 25 μg group mean about 66.5 μg/mL). Also, a clear dose response was seen over the entire range for both R3′.2x (referred to as HL822, SEQ ID NO: 10) and C-terminal (referred to as HL929, SEQ ID NO: 26) fusion protein formats. As with fusion proteins that include toxin A antigens, there was no significant difference between the formats at any dose level. As with fusion proteins that include toxin A antigens, both formats elicited higher antibody levels than the toxin B in adjuvant control, although these differences were not significant.

[0207] The results of the post-boost 2 serum are shown in FIGS. 13A and 13B. Anti-Toxoid A specific IgG rose to group means of about ≧1,000 μg/mL for certain groups of both R3′.2x (referred to as HL821, SEQ ID NO: 9) and C-terminal (referred to as HL928, SEQ ID NO: 25) fusion formats (FIG. 13A). The Toxoid A in adjuvant group also rose to a group mean of about >1,000 μg/ml. Anti-Toxoid B titers also rose to group means about >1,000 μg/mL for both R3′.2x (referred to as HL822, SEQ ID NO: 10) and C-terminal (referred to as HL929, SEQ ID NO: 26) formats of flagellin fusion proteins, as well as the Toxoid B plus adjuvant control (FIG. 13B).

[0208] Finally, the post-boost 2 serum from mice treated with fusion proteins that include either Toxin A or B were tested for neutralizing titers using a cell-based assay. In this method, the mouse intestinal cell line CT26 is exposed to a cytostatic concentration of Toxin A or Toxin B. After about 72 hours, live cells are quantified by measuring ATP using a luciferase assay. In the assay, a single solution includes a lysis reagent, which release the ATP from the cells, luciferin substrate and luciferase enzyme. As the luciferase reaction requires ATP, light emission, measured in a 96-well plate luminometer, is proportional to ATP, which is proportional to the number of live cells. In the presence of Toxin, cells stop dividing and the level of ATP is low. In the absence of Toxin, cells continue to divide and light units, are about >10-fold higher than that seen from cells treated with Toxin. Post-boost 2 serum (diluted from 1:100 to 1:3,162) from mice immunized with 10 μg of either the R3′.2x (referred to as HL821, SEQ ID NO: 9) or C-terminal (referred to as HL928, SEQ ID NO: 25) fusion protein formats were able to neutralize the Toxin A to the level of the Vehicle control (no Toxin), when preincubated with Toxin A prior to addition to cells (FIGS. 14 A and B). The serum from mice injected with the R3′.2x format of Toxin A (HL821 SEQ ID 9) showed strong neutralizing titers with all 5 mice having plateau values (near 100%) to 1:1,000, declining at 1:3,162 (FIG. 14A). The serum from mice injected with the C terminal format of Toxin A (HL928 SEQ ID 25) also showed strong neutralizing titers with all 5 mice having plateau values (near 100%) to at least 1:3,162 (FIG. 14B). The Toxoid A plus adjuvant positive control serum pool was also able to neutralize Toxin A out to at least 1:3,162, while a pool of serum from mice injected with negative control buffer (F147, diluted 1:100) was equivalent to the Cell control (about 0% growth) (FIG. 14C). Further dilution of the HL928 post-boost 2 serum, however, will determine true values of 50% titers.

[0209] Post-boost 2 serum (diluted from 1:100 to 1:3,162) from mice immunized with 10 μg of the Toxin B C-terminal (referred to as HL929, SEQ ID NO: 26) fusion protein format was able to neutralize the Toxin B to the level of the Vehicle control (no Toxin), when preincubated with Toxin B prior to addition to cells (FIG. 15A). The serum from mice injected with the C terminal format of Toxin B (HL929, SEQ ID NO: 26) showed strong neutralizing titers with 4 of 5 mice having plateau values (near 100%) to 1:1,000, with one mouse declining to 0% at 1:1,000 and the other 4 declining at 1:3,162 (FIG. 15A). The Toxoid B plus adjuvant positive control serum pool was also able to neutralize Toxin B out to at least 1:3,162, while a pool of serum from mice injected with buffer (F 147 as a negative control, diluted 1:100) was equivalent to the Cell control (about 0% growth) (FIG. 15B).

### Conclusion

[0210] Genetic fusion of elements of the RBD of either Toxin A or Toxin B of C. difficile with flagellin, in either R3′.2x or C-terminal formats, creates recombinant fusion proteins with the following properties. The fusion proteins are recognized by antibodies to both C. difficile Toxins and flagellin in a Capture ELISA. The fusion proteins activate TLR5 HEK293 cells in a dose-dependent manner, causing the secretion of the cytokine IL-8, demonstrating the function of the flagellin portion of the fusion proteins. The fusion proteins compete with wild type flagellin to bind a recombinant, soluble form of mouse TLR5, in the TLR5-Fc Competition Assay. The fusion proteins are immunogenic in mice resulting both in Toxoid-specific IgG, in the Mouse Serum ELISA, and in Toxin A and B neutralizing antibodies, in the Toxin Neutralization Test. The anti-Toxin A titers observed for both R3′.2x (HL821, SEQ ID NO: 9) and C-terminal (HL928, SEQ ID NO: 25) post-boost 2 serum were ≧1:1,000 which is consistent with the range of effective titers (667 to 6,667) calculated by comparing clinically effective doses and neutralizing titers of monoclonal antibodies (Lowy, I., et al., N. Eng. J. Med. 362: 197-205 (2010); Babcock, G. J., et al., Infect. Immun. 74: 6339-47 (2006)). Toxin B titers are also consistent with the range of effective titers (222 to 2,222) calculated using Lowy, I., et al., N. Eng. J. Med. 362: 197-205 (2010) and Babcock, G. J., et al., Infect. Immun. 74: 6339-47 (2006). Fusion proteins of the invention may be useful to ameliorate Clostridium difficile associated disease, including Clostridium difficile-associated diarrhea and pseudomembranous colitis in susceptible patients.

[0211] The teachings of all patents, published applications and references cited herein are incorporated by reference in their entirety.

[0212] While this invention has been particularly shown and described with references to example embodiments thereof, it will be understood by those skilled in the art that various changes in form and details may be made therein without departing from the scope of the invention encompassed by the appended claims.

The application's sequence listing, which the Patent Office published only in electronic form, follows.

SEQUENCE LISTING (103 sequences)

SEQ ID NO: 1 - protein, 1050 aa, Artificial Sequence
  Fusion Protein STF2.GTD-A1
MAQVINTNSLSLLTQNNLNKSQSALGTAIERLSSGLRINSAKDDAAGQAIANRFTANIKGLTQASRNANDGISIAQTTEGALNEINNNLQRVRELAVQSANSTNSQSDLDSIQAEITQRLNEIDRVSGQTQFNGVKVLAQDNTLTIQVGANDGETIDIDLKQINSQTLGLDSLNVQKAYDVKDTAVTTKAYANNGTTLDVSGLDDAAIKAATGGTNGTASVTGGAVKFDADNNKYFVTIGGFTGADAAKNGDYEVNVATDGTVTLAAGATKTTMPAGATTKTEVQELKDTPAVVSADAKNALIAGGVDATDANGAELVKMSYTDKNGKTIEGGYALKAGDKYYAADYDEATGAIKAKTTSYTAADGTTKTAANQLGGVDGKTEVVTIDGKTYNASKAAGHDFKAQPELAEAAAKTTENPLQKIDAALAQVDALRSDLGAVQNRFNSAITNLGNTVNNLSEARSRIEDSDYATEVSNMSRAQILQQAGTSVLAQANQVPQNVLSLLASLISKEELIKLAYSIRPRENEYKTILTNLDEYNKLTTNNNENKYLQLKKLNESIDVFMNKYKTSSRNRALSNLKKDILKEVILIKNSNTSPVEKNLHFVWIGGEVSDIALEYIKQWADINAEYNIKLWYDSEAFLVNTLKKAIVESSTTEALQLLEEEIQNPQFDNMKFYKKRMEFIYDRQKRFINYYKSQINKPTVPTIDDIIKSHLVSEYNRDETVLESYRTNSLRKINSNHGIDIRANSLFTEQELLNIYSQELLNRGNLAAASNIVRLLALKNFGGVYLNVDMLPGIHSDLFKTISRPSSIGLDRWEMIKLEAIMKYKKYINNYTSENFDKLDQQLKDNFKLIIESKSEKSEIFSKLENLNVSDLEIKIAFALGSVINQALISKQGSYLTNLVIEQVKNRYQFLNQHLNPAIESDNNFTDTTKIFHDSLFNSATAENSMFLTKIAPYLQVGFMPEARSTISLSGPGAYASAYYDFINLQENTIEKTLKASDLIEFKFPENNLSQLTEQEINSLWSFDQASAKYQFEKYVRDYTGGSLSED

SEQ ID NO: 2 - protein, 1051 aa, Artificial Sequence
  Fusion Protein STF2.GTD-B1
MAQVINTNSLSLLTQNNLNKSQSALGTAIERLSSGLRINSAKDDAAGQAIANRFTANIKGLTQASRNANDGISIAQTTEGALNEINNNLQRVRELAVQSANSTNSQSDLDSIQAEITQRLNEIDRVSGQTQFNGVKVLAQDNTLTIQVGANDGETIDIDLKQINSQTLGLDSLNVQKAYDVKDTAVTTKAYANNGTTLDVSGLDDAAIKAATGGTNGTASVTGGAVKFDADNNKYFVTIGGFTGADAAKNGDYEVNVATDGTVTLAAGATKTTMPAGATTKTEVQELKDTPAVVSADAKNALIAGGVDATDANGAELVKMSYTDKNGKTIEGGYALKAGDKYYAADYDEATGAIKAKTTSYTAADGTTKTAANQLGGVDGKTEVVTIDGKTYNASKAAGHDFKAQPELAEAAAKTTENPLQKIDAALAQVDALRSDLGAVQNRFNSAITNLGNTVNNLSEARSRIEDSDYATEVSNMSRAQILQQAGTSVLAQANQVPQNVLSLLASLVNRKQLEKMANVRFRTQEDEYVAILDALEEYHNMSENTVVEKYLKLKDINSLTDIYIDTYKKSGRNKALKKFKEYLVTEVLELKNNNLTPVEKNLHFVWIGGQINDTAINYINQWKDVNSDYNVNVFYDSNAFLINTLKKTVVESAINDTLESFRENLNDPRFDYNKFFRKRMEIIYDKQKNFINYYKAQREENPELIIDDIVKTYLSNEYSKEIDELNTYIEESLNKITQNSGNDVRNFEEFKNGESFNLYEQELVERWNLAAASNILRISALKEIGGMYLNVDMLPGIQPDLFESIEKPSSVTVDFWEMTKLEAIMKYKEYIPEYTSEHFDMLDEEVQSSFESVLASKSDKSEIFSSLGDMEASPLEVKIAFNSKGIINQGLISVKDSYCSNLIVKQIENRYKILNNSLNPAISEDNDFNTTTNTFIDSIMAEANADNGRFMMELGKYLRVGFFPDVKTTINLSGPEAYAAAYQDLLMFKEGSMNIHLIEADLRNFEISKTNISQSTEQEMASLWSFDDARAKAQFEEYKRNYFEGSLGED

SEQ ID NO: 3 - protein, 1097 aa, Artificial Sequence
  Fusion Protein STF2R3'(f1).GTD-A1
MAQVINTNSLSLLTQNNLNKSQSALGTAIERLSSGLRINSAKDDAAGQAIANRFTANIKGLTQASRNANDGISIAQTTEGALNEINNNLQRVRELAVQSANSTNSQSDLDSIQAEITQRLNEIDRVSGQTQFNGVKVLAQDNTLTIQVGANDGETIDIDLKQINSQTLGLDSLNVQKAYDVKDTAVTTKAYANGGGGGNRYYFEPNTAMGANGYKTIDNKNFYFRNGLPQIGVFKGSNGFEYFAPANTDANNIEGQAIRYQNRFLHLLGKIYYFGNNSKAVTGWQTINGKVYYFMPDTAMAAAGGLFEIDGVIYFFGVDGVKAPGIYGGGGGELKDTPAVVSADAKNALIAGGVDATDANGAELVKMSYTDKNGKTIEGGYALKAGDKYYAADYDEATGAIKAKTTSYTAADGTTKTAANQLGGVDGKTEVVTIDGKTYNASKAAGHDFKAQPELAEAAAKTTENPLQKIDAALAQVDALRSDLGAVQNRFNSAITNLGNTVNNLSEARSRIEDSDYATEVSNMSRAQILQQAGTSVLAQANQVPQNVLSLLASLISKEELIKLAYSIRPRENEYKTILTNLDEYNKLTTNNNENKYLQLKKLNESIDVFMNKYKTSSRNRALSNLKKDILKEVILIKNSNTSPVEKNLHFVWIGGEVSDIALEYIKQWADINAEYNIKLWYDSEAFLVNTLKKAIVESSTTEALQLLEEEIQNPQFDNMKFYKKRMEFIYDRQKRFINYYKSQINKPTVPTIDDIIKSHLVSEYNRDETVLESYRTNSLRKINSNHGIDIRANSLFTEQELLNIYSQELLNRGNLAAASNIVRLLALKNFGGVYLNVDMLPGIHSDLFKTISRPSSIGLDRWEMIKLEAIMKYKKYINNYTSENFDKLDQQLKDNFKLIIESKSEKSEIFSKLENLNVSDLEIKIAFALGSVINQALISKQGSYLTNLVIEQVKNRYQFLNQHLNPAIESDNNFTDTTKIFHDSLFNSATAENSMFLTKIAPYLQVGFMPEARSTISLSGPGAYASAYYDFINLQENTIEKTLKASDLIEFKFPENNLSQLTEQEINSLWSFDQASAKYQFEKYVRDYTGGSLSED

SEQ ID NO: 4 - protein, 1114 aa, Artificial Sequence
  Fusion Protein STF2R3'(f1).GTD-B1
MAQVINTNSLSLLTQNNLNKSQSALGTAIERLSSGLRINSAKDDAAGQAIANRFTANIKGLTQASRNANDGISIAQTTEGALNEINNNLQRVRELAVQSANSTNSQSDLDSIQAEITQRLNEIDRVSGQTQFNGVKVLAQDNTLTIQVGANDGETIDIDLKQINSQTLGLDSLNVQKAYDVKDTAVTTKAYANGGGGGKYYFNPETKKACKGINLIDDIKYYFDEKGIMRTGLISFENNNYYFNENGEMQFGYINIEDKMFYFGEDGVMQIGVFNTPDGFKYFAHQNTLDENFEGESINYTGWLDLDEKRYYFTDEYIAATGSVIIDGEEYYFDPDTAQLVISEGGGGELKDTPAVVSADAKNALIAGGVDATDANGAELVKMSYTDKNGKTIEGGYALKAGDKYYAADYDEATGAIKAKTTSYTAADGTTKTAANQLGGVDGKTEVVTIDGKTYNASKAAGHDFKAQPELAEAAAKTTENPLQKIDAALAQVDALRSDLGAVQNRFNSAITNLGNTVNNLSEARSRIEDSDYATEVSNMSRAQILQQAGTSVLAQANQVPQNVLSLLASLVNRKQLEKMANVRFRTQEDEYVAILDALEEYHNMSENTVVEKYLKLKDINSLTDIYIDTYKKSGRNKALKKFKEYLVTEVLELKNNNLTPVEKNLHFVWIGGQINDTAINYINQWKDVNSDYNVNVFYDSNAFLINTLKKTVVESAINDTLESFRENLNDPRFDYNKFFRKRMEIIYDKQKNFINYYKAQREENPELIIDDIVKTYLSNEYSKEIDELNTYIEESLNKITQNSGNDVRNFEEFKNGESFNLYEQELVERWNLAAASNILRISALKEIGGMYLNVDMLPGIQPDLFESIEKPSSVTVDFWEMTKLEAIMKYKEYIPEYTSEHFDMLDEEVQSSFESVLASKSDKSEIFSSLGDMEASPLEVKIAFNSKGIINQGLISVKDSYCSNLIVKQIENRYKILNNSLNPAISEDNDFNTTTNTFIDSIMAEANADNGRFMMELGKYLRVGFFPDVKTTINLSGPEAYAAAYQDLLMFKEGSMNIHLIEADLRNFEISKTNISQSTEQEMASLWSFDDARAKAQFEEYKRNYFEGSLGED

SEQ ID NO: 5 - protein, 772 aa, Artificial Sequence
  Fusion Protein STF2.CPD-A1
MAQVINTNSLSLLTQNNLNKSQSALGTAIERLSSGLRINSAKDDAAGQAIANRFTANIKGLTQASRNANDGISIAQTTEGALNEINNNLQRVRELAVQSANSTNSQSDLDSIQAEITQRLNEIDRVSGQTQFNGVKVLAQDNTLTIQVGANDGETIDIDLKQINSQTLGLDSLNVQKAYDVKDTAVTTKAYANNGTTLDVSGLDDAAIKAATGGTNGTASVTGGAVKFDADNNKYFVTIGGFTGADAAKNGDYEVNVATDGTVTLAAGATKTTMPAGATTKTEVQELKDTPAVVSADAKNALIAGGVDATDANGAELVKMSYTDKNGKTIEGGYALKAGDKYYAADYDEATGAIKAKTTSYTAADGTTKTAANQLGGVDGKTEVVTIDGKTYNASKAAGHDFKAQPELAEAAAKTTENPLQKIDAALAQVDALRSDLGAVQNRFNSAITNLGNTVNNLSEARSRIEDSDYATEVSNMSRAQILQQAGTSVLAQANQVPQNVLSLLASEDNGVDFNKNTALDKNYLLNNKIPSNNVEEAGSKNYVHYIIQLQGNDISYEATCNLFSKNPKNSIIIQRNMNESAKSYFLSDDGESILELNKYRIPERLKNKEKVKVTFIGAGKDEFNTSEFARLSVDSLSNEISSFLDTIKLDISPKNVEVNLLGSNMFSYDFNVEETYPGKLLLSIMDKITSTLPDVNKNSITIGANQYEVRINSEGRKELLAHSGKWINKEEAIMSDLSSKEYIFFDSIDNKLKAKSKNIPGLASISEDIKT

SEQ ID NO: 6 - protein, 769 aa, Artificial Sequence
  Fusion Protein STF2.CPD-B1
MAQVINTNSLSLLTQNNLNKSQSALGTAIERLSSGLRINSAKDDAAGQAIANRFTANIKGLTQASRNANDGISIAQTTEGALNEINNNLQRVRELAVQSANSTNSQSDLDSIQAEITQRLNEIDRVSGQTQFNGVKVLAQDNTLTIQVGANDGETIDIDLKQINSQTLGLDSLNVQKAYDVKDTAVTTKAYANNGTTLDVSGLDDAAIKAATGGTNGTASVTGGAVKFDADNNKYFVTIGGFTGADAAKNGDYEVNVATDGTVTLAAGATKTTMPAGATTKTEVQELKDTPAVVSADAKNALIAGGVDATDANGAELVKMSYTDKNGKTIEGGYALKAGDKYYAADYDEATGAIKAKTTSYTAADGTTKTAANQLGGVDGKTEVVTIDGKTYNASKAAGHDFKAQPELAEAAAKTTENPLQKIDAALAQVDALRSDLGAVQNRFNSAITNLGNTVNNLSEARSRIEDSDYATEVSNMSRAQILQQAGTSVLAQANQVPQNVLSLLAGEDDNLDFSQNIVVDKEYLLEKISSLARSSERGYIHYIVQLQGNKISYEAACNLFAKTPYDSVLFQKNIEDSEIAYYYNPGDGEIQEIDKYKIPSIISDRPKIKLTFIGAGKDEFNTDIFAGFDVDSLSTEIEAAIDLAKEDISPKSIEINLLGSNMFSYSINVEETYPGKLLLKVKDKISELMPSISQDSIIVSANQYEVRINSEGRRELLDHSGEWINKEESIIKDISSKEYISFNPKENKITVKSKNLPELSTLLQEIRN

SEQ ID NO: 7 - protein, 819 aa, Artificial Sequence
  Fusion Protein STF2R3'(f1).CPD-A1
MAQVINTNSLSLLTQNNLNKSQSALGTAIERLSSGLRINSAKDDAAGQAIANRFTANIKGLTQASRNANDGISIAQTTEGALNEINNNLQRVRELAVQSANSTNSQSDLDSIQAEITQRLNEIDRVSGQTQFNGVKVLAQDNTLTIQVGANDGETIDIDLKQINSQTLGLDSLNVQKAYDVKDTAVTTKAYANGGGGGNRYYFEPNTAMGANGYKTIDNKNFYFRNGLPQIGVFKGSNGFEYFAPANTDANNIEGQAIRYQNRFLHLLGKIYYFGNNSKAVTGWQTINGKVYYFMPDTAMAAAGGLFEIDGVIYFFGVDGVKAPGIYGGGGGELKDTPAVVSADAKNALIAGGVDATDANGAELVKMSYTDKNGKTIEGGYALKAGDKYYAADYDEATGAIKAKTTSYTAADGTTKTAANQLGGVDGKTEVVTIDGKTYNASKAAGHDFKAQPELAEAAAKTTENPLQKIDAALAQVDALRSDLGAVQNRFNSAITNLGNTVNNLSEARSRIEDSDYATEVSNMSRAQILQQAGTSVLAQANQVPQNVLSLLASEDNGVDFNKNTALDKNYLLNNKIPSNNVEEAGSKNYVHYIIQLQGNDISYEATCNLFSKNPKNSIIIQRNMNESAKSYFLSDDGESILELNKYRIPERLKNKEKVKVTFIGAGKDEFNTSEFARLSVDSLSNEISSFLDTIKLDISPKNVEVNLLGSNMFSYDFNVEETYPGKLLLSIMDKITSTLPDVNKNSITIGANQYEVRINSEGRKELLAHSGKWINKEEAIMSDLSSKEYIFFDSIDNKLKAKSKNIPGLASISEDIKT

SEQ ID NO: 8 - protein, 832 aa, Artificial Sequence
  Fusion Protein STF2R3'(f1).CPD-B1
MAQVINTNSLSLLTQNNLNKSQSALGTAIERLSSGLRINSAKDDAAGQAIANRFTANIKGLTQASRNANDGISIAQTTEGALNEINNNLQRVRELAVQSANSTNSQSDLDSIQAEITQRLNEIDRVSGQTQFNGVKVLAQDNTLTIQVGANDGETIDIDLKQINSQTLGLDSLNVQKAYDVKDTAVTTKAYANGGGGGKYYFNPETKKACKGINLIDDIKYYFDEKGIMRTGLISFENNNYYFNENGEMQFGYINIEDKMFYFGEDGVMQIGVFNTPDGFKYFAHQNTLDENFEGESINYTGWLDLDEKRYYFTDEYIAATGSVIIDGEEYYFDPDTAQLVISEGGGGELKDTPAVVSADAKNALIAGGVDATDANGAELVKMSYTDKNGKTIEGGYALKAGDKYYAADYDEATGAIKAKTTSYTAADGTTKTAANQLGGVDGKTEVVTIDGKTYNASKAAGHDFKAQPELAEAAAKTTENPLQKIDAALAQVDALRSDLGAVQNRFNSAITNLGNTVNNLSEARSRIEDSDYATEVSNMSRAQILQQAGTSVLAQANQVPQNVLSLLAGEDDNLDFSQNIVVDKEYLLEKISSLARSSERGYIHYIVQLQGNKISYEAACNLFAKTPYDSVLFQKNIEDSEIAYYYNPGDGEIQEIDKYKIPSIISDRPKIKLTFIGAGKDEFNTDIFAGFDVDSLSTEIEAAIDLAKEDISPKSIEINLLGSNMFSYSINVEETYPGKLLLKVKDKISELMPSISQDSIIVSANQYEVRINSEGRRELLDHSGEWINKEESIIKDISSKEYISFNPKENKITVKSKNLPELSTLLQEIRN

SEQ ID NO: 9 - protein, 874 aa, Artificial Sequence
  Fusion Protein STF2R3'(f1).RBD-A1, HL821
MAQVINTNSLSLLTQNNLNKSQSALGTAIERLSSGLRINSAKDDAAGQAIANRFTANIKGLTQASRNANDGISIAQTTEGALNEINNNLQRVRELAVQSANSTNSQSDLDSIQAEITQRLNEIDRVSGQTQFNGVKVLAQDNTLTIQVGANDGETIDIDLKQINSQTLGLDSLNVQKAYDVKDTAVTTKAYANGGGGGNRYYFEPNTAMGANGYKTIDNKNFYFRNGLPQIGVFKGSNGFEYFAPANTDANNIEGQAIRYQNRFLHLLGKIYYFGNNSKAVTGWQTINGKVYYFMPDTAMAAAGGLFEIDGVIYFFGVDGVKAPGIYGGGGGELKDTPAVVSADAKNALIAGGVDATDANGAELVKMSYTDKNGKTIEGGYALKAGDKYYAADYDEATGAIKAKTTSYTAADGTTKTAANQLGGVDGKTEVVTIDGKTYNASKAAGHDFKAQPELAEAAAKTTENPLQKIDAALAQVDALRSDLGAVQNRFNSAITNLGNTVNNLSEARSRIEDSDYATEVSNMSRAQILQQAGTSVLAQANQVPQNVLSLLAASTGYTSINGKHFYFNTDGIMQIGVFKGPNGFEYFAPANTDANNIEGQAILYQNKFLTLNGKKYYFGSDSKAVTGLRTIDGKKYYFNTNTAVAVTGWQTINGKKYYFNTNTSIASTGYTIISGKHFYFNTDGIMQIGVFKGPDGFEYFAPANTDANNIEGQAIRYQNRFLYLHDNIYYFGNNSKAATGWVTIDGNRYYFEPNTAMGANGYKTIDNKNFYFRNGLPQIGVFKGSNGFEYFAPANTDANNIEGQAIRYQNRFLHLLGKIYYFGNNSKAVTGWQTINGKVYYFMPDTAMAAAGGLFEIDGVIYFFGVDGVKAPG

SEQ ID NO: 10 - protein, 931 aa, Artificial Sequence
  Fusion Protein STF2R3'(f1).RBD-B1, HL822
MAQVINTNSLSLLTQNNLNKSQSALGTAIERLSSGLRINSAKDDAAGQAIANRFTANIKGLTQASRNANDGISIAQTTEGALNEINNNLQRVRELAVQSANSTNSQSDLDSIQAEITQRLNEIDRVSGQTQFNGVKVLAQDNTLTIQVGANDGETIDIDLKQINSQTLGLDSLNVQKAYDVKDTAVTTKAYANGGGGGKYYFNPETKKACKGINLIDDIKYYFDEKGIMRTGLISFENNNYYFNENGEMQFGYINIEDKMFYFGEDGVMQIGVFNTPDGFKYFAHQNTLDENFEGESINYTGWLDLDEKRYYFTDEYIAATGSVIIDGEEYYFDPDTAQLVISEGGGGELKDTPAVVSADAKNALIAGGVDATDANGAELVKMSYTDKNGKTIEGGYALKAGDKYYAADYDEATGAIKAKTTSYTAADGTTKTAANQLGGVDGKTEVVTIDGKTYNASKAAGHDFKAQPELAEAAAKTTENPLQKIDAALAQVDALRSDLGAVQNRFNSAITNLGNTVNNLSEARSRIEDSDYATEVSNMSRAQILQQAGTSVLAQANQVPQNVLSLLAMKVGYTEIDGKHFYFAENGEMQIGVFNTEDGFKYFAHHNEDLGNEEGEEISYSGILNFNNKIYYFDDSFTAVVGWKDLEDGSKYYFDEDTAEAYIGLSLINDGQYYFNDDGIMQVGFVTINDKVFYFSDSGIIESGVQNIDDNYFYIDDNGIVQIGVFDTSDGYKYFAPANTVNDNIYGQAVEYSGLVRVGEDVYYFGETYTIETGWIYDMENESDKYYFNPETKKACKGINLIDDIKYYFDEKGIMRTGLISFENNNYYFNENGEMQFGYINIEDKMFYFGEDGVMQIGVFNTPDGFKYFAHQNTLDENFEGESINYTGWLDLDEKRYYFTDEYIAATGSVIIDGEEYYFDPDTAQLVISE

SEQ ID NO: 11 - protein, 1452 aa, Artificial Sequence
  Fusion Protein STF2R3'(f1).RBD-A2
MAQVINTNSLSLLTQNNLNKSQSALGTAIERLSSGLRINSAKDDAAGQAIANRFTANIKGLTQASRNANDGISIAQTTEGALNEINNNLQRVRELAVQSANSTNSQSDLDSIQAEITQRLNEIDRVSGQTQFNGVKVLAQDNTLTIQVGANDGETIDIDLKQINSQTLGLDSLNVQKAYDVKDTAVTTKAYANGGGGGNRYYFEPNTAMGANGYKTIDNKNFYFRNGLPQIGVFKGSNGFEYFAPANTDANNIEGQAIRYQNRFLHLLGKIYYFGNNSKAVTGWQTINGKVYYFMPDTAMAAAGGLFEIDGVIYFFGVDGVKAPGIYGGGGGELKDTPAVVSADAKNALIAGGVDATDANGAELVKMSYTDKNGKTIEGGYALKAGDKYYAADYDEATGAIKAKTTSYTAADGTTKTAANQLGGVDGKTEVVTIDGKTYNASKAAGHDFKAQPELAEAAAKTTENPLQKIDAALAQVDALRSDLGAVQNRFNSAITNLGNTVNNLSEARSRIEDSDYATEVSNMSRAQILQQAGTSVLAQANQVPQNVLSLLAGFKIIDNKTYYYDEDSKLVKGLININNSLFYFDPIEFNLVTGWQTINGKKYYFDINTGAALTSYKIINGKHFYFNNDGVMQLGVFKGPDGFEYFAPANTQNNNIEGQAIVYQSKFLTLNGKKYYFDNNSKAVTGWRIINNEKYYFNPNNAIAAVGLQVIDNNKYYFNPDTAIISKGWQTVNGSRYYFDTDTAIAFNGYKTIDGKHFYFDSDCVVKIGVFSTSNGFEYFAPANTYNNNIEGQAIVYQSKFLTLNGKKYYFDNNSKAVTGWQTIDSKKYYFNTNTAEAATGWQTIDGKKYYFNTNTAEAATGWQTIDGKKYYFNTNTAIASTGYTIINGKHFYFNTDGIMQIGVFKGPNGFEYFAPANTDANNIEGQAILYQNEFLTLNGKKYYFGSDSKAVTGWRIINNKKYYFNPNNAIAAIHLCTINNDKYYFSYDGILQNGYITIERNNFYFDANNESKMVTGVFKGPNGFEYFAPANTHNNNIEGQAIVYQNKFLTLNGKKYYFDNDSKAVTGWQTIDGKKYYFNLNTAEAATGWQTIDGKKYYFNLNTAEAATGWQTIDGKKYYFNTNTFIASTGYTSINGKHFYFNTDGIMQIGVFKGPNGFEYFAPANTDANNIEGQAILYQNKFLTLNGKKYYFGSDSKAVTGLRTIDGKKYYFNTNTAVAVTGWQTINGKKYYFNTNTSIASTGYTIISGKHFYFNTDGIMQIGVFKGPDGFEYFAPANTDANNIEGQAIRYQNRFLYLHDNIYYFGNNSKAATGWVTIDGNRYYFEPNTAMGANGYKTIDNKNFYFRNGLPQIGVFKGSNGFEYFAPANTDANNIEGQAIRYQNRFLHLLGKIYYFGNNSKAVTGWQTINGKVYYFMPDTAMAAAGGLFEIDGVIYFFGVDGVKAPGIYG

SEQ ID NO: 12 - protein, 1122 aa, Artificial Sequence
  Fusion Protein STF2R3'(f1).RBD-B2
MAQVINTNSLSLLTQNNLNKSQSALGTAIERLSSGLRINSAKDDAAGQAIANRFTANIKGLTQASRNANDGISIAQTTEGALNEINNNLQRVRELAVQSANSTNSQSDLDSIQAEITQRLNEIDRVSGQTQFNGVKVLAQDNTLTIQVGANDGETIDIDLKQINSQTLGLDSLNVQKAYDVKDTAVTTKAYANGGGGGKYYFNPETKKACKGINLIDDIKYYFDEKGIMRTGLISFENNNYYFNENGEMQFGYINIEDKMFYFGEDGVMQIGVFNTPDGFKYFAHQNTLDENFEGESINYTGWLDLDEKRYYFTDEYIAATGSVIIDGEEYYFDPDTAQLVISEGGGGELKDTPAVVSADAKNALIAGGVDATDANGAELVKMSYTDKNGKTIEGGYALKAGDKYYAADYDEATGAIKAKTTSYTAADGTTKTAANQLGGVDGKTEVVTIDGKTYNASKAAGHDFKAQPELAEAAAKTTENPLQKIDAALAQVDALRSDLGAVQNRFNSAITNLGNTVNNLSEARSRIEDSDYATEVSNMSRAQILQQAGTSVLAQANQVPQNVLSLLAGLVSLYNEKFYINNFGMMVSGLIYINDSLYYFKPPVNNLITGFVTVGDDKYYFNPINGGAASIGETIIDDKNYYFNQSGVLQTGVFSTEDGFKYFAPANTLDENLEGEAIDFTGKLIIDENIYYFDDNYRGAVEWKELDGEMHYFSPETGKAFKGLNQIGDYKYYFNSDGVMQKGFVSINDNKHYFDDSGVMKVGYTEIDGKHFYFAENGEMQIGVFNTEDGFKYFAHHNEDLGNEEGEEISYSGILNFNNKIYYFDDSFTAVVGWKDLEDGSKYYFDEDTAEAYIGLSLINDGQYYFNDDGIMQVGFVTINDKVFYFSDSGIIESGVQNIDDNYFYIDDNGIVQIGVFDTSDGYKYFAPANTVNDNIYGQAVEYSGLVRVGEDVYYFGETYTIETGWIYDMENESDKYYFNPETKKACKGINLIDDIKYYFDEKGIMRTGLISFENNNYYFNENGEMQFGYINIEDKMFYFGEDGVMQIGVFNTPDGFKYFAHQNTLDENFEGESINYTGWLDLDEKRYYFTDEYIAATGSVIIDGEEYYFDPDTAQLVISE

SEQ ID NO: 13 - protein, 2221 aa, Artificial Sequence
  Fusion Protein STF2R3'(2xRBD-A)
MAQVINTNSLSLLTQNNLNKSQSALGTAIERLSSGLRINSAKDDAAGQAIANRFTANIKGLTQASRNANDGISIAQTTEGALNEINNNLQRVRELAVQSANSTNSQSDLDSIQAEITQRLNEIDRVSGQTQFNGVKVLAQDNTLTIQVGANDGETIDIDLKQINSQTLGLDSLNVQKAYDVKDTAVTTKAYANGGGGFKIIDNKTYYYDEDSKLVKGLININNSLFYFDPIEFNLVTGWQTINGKKYYFDINTGAALTSYKIINGKHFYFNNDGVMQLGVFKGPDGFEYFAPANTQNNNIEGQAIVYQSKFLTLNGKKYYFDNNSKAVTGWRIINNEKYYFNPNNAIAAVGLQVIDNNKYYFNPDTAIISKGWQTVNGSRYYFDTDTAIAFNGYKTIDGKHFYFDSDCVVKIGVFSTSNGFEYFAPANTYNNNIEGQAIVYQSKFLTLNGKKYYFDNNSKAVTGWQTIDSKKYYFNTNTAEAATGWQTIDGKKYYFNTNTAEAATGWQTIDGKKYYFNTNTAIASTGYTIINGKHFYFNTDGIMQIGVFKGPNGFEYFAPANTDANNIEGQAILYQNEFLTLNGKKYYFGSDSKAVTGWRIINNKKYYFNPNNAIAAIHLCTINNDKYYFSYDGILQNGYITIERNNFYFDANNESKMVTGVFKGPNGFEYFAPANTHNNNIEGQAIVYQNKFLTLNGKKYYFDNDSKAVTGWQTIDGKKYYFNLNTAEAATGWQTIDGKKYYFNLNTAEAATGWQTIDGKKYYFNTNTFIASTGYTSINGKHFYFNTDGIMQIGVFKGPNGFEYFAPANTDANNIEGQAILYQNKFLTLNGKKYYFGSDSKAVTGLRTIDGKKYYFNTNTAVAVTGWQTINGKKYYFNTNTSIASTGYTIISGKHFYFNTDGIMQIGVFKGPDGFEYFAPANTDANNIEGQAIRYQNRFLYLHDNIYYFGNNSKAATGWVTIDGNRYYFEPNTAMGANGYKTIDNKNFYFRNGLPQIGVFKGSNGFEYFAPANTDANNIEGQAIRYQNRFLHLLGKIYYFGNNSKAVTGWQTINGKVYYFMPDTAMAAAGGLFEIDGVIYFFGVDGVKAPGIYGGGGGFKIIDNKTYYYDEDSKLVKGLININNSLFYFDPIEFNLVTGWQTINGKKYYFDINTGAALTSYKIINGKHFYFNNDGVMQLGVFKGPDGFEYFAPANTQNNNIEGQAIVYQSKFLTLNGKKYYFDNNSKAVTGWRIINNEKYYFNPNNAIAAVGLQVIDNNKYYFNPDTAIISKGWQTVNGSRYYFDTDTAIAFNGYKTIDGKHFYFDSDCVVKIGVFSTSNGFEYFAPANTYNNNIEGQAIVYQSKFLTLNGKKYYFDNNSKAVTGWQTIDSKKYYFNTNTAEAATGWQTIDGKKYYFNTNTAEAATGWQTIDGKKYYFNTNTAIASTGYTIINGKHFYFNTDGIMQIGVFKGPNGFEYFAPANTDANNIEGQAILYQNEFLTLNGKKYYFGSDSKAVTGWRIINNKKYYFNPNNAIAAIHLCTINNDKYYFSYDGILQNGYITIERNNFYFDANNESKMVTGVFKGPNGFEYFAPANTHNNNIEGQAIVYQNKFLTLNGKKYYFDNDSKAVTGWQTIDGKKYYFNLNTAEAATGWQTIDGKKYYFNLNTAEAATGWQTIDGKKYYFNTNTFIASTGYTSINGKHFYFNTDGIMQIGVFKGPNGFEYFAPANTDANNIEGQAILYQNKFLTLNGKKYYFGSDSKAVTGLRTIDGKKYYFNTNTAVAVTGWQTINGKKYYFNTNTSIASTGYTIISGKHFYFNTDGIMQIGVFKGPDGFEYFAPANTDANNIEGQAIRYQNRFLYLHDNIYYFGNNSKAATGWVTIDGNRYYFEPNTAMGANGYKTIDNKNFYFRNGLPQIGVFKGSNGFEYFAPANTDANNIEGQAIRYQNRFLHLLGKIYYFGNNSKAVTGWQTINGKVYYFMPDTAMAAAGGLFEIDGVIYFFGVDGVKAPGIYGGGGELKDTPAVVSADAKNALIAGGVDATDANGAELVKMSYTDKNGKTIEGGYALKAGDKYYAADYDEATGAIKAKTTSYTAADGTTKTAANQLGGVDGKTEVVTIDGKTYNASKAAGHDFKAQPELAEAAAKTTENPLQKIDAALAQVDALRSDLGAVQNRFNSAITNLGNTVNNLSEARSRIEDSDYATEVSNMSRAQILQQAGTSVLAQANQVPQNVLSLLA

SEQ ID NO: 14 - protein, 1529 aa, Artificial Sequence
  Fusion Protein STF2R3'(2xRBD-B)
MAQVINTNSLSLLTQNNLNKSQSALGTAIERLSSGLRINSAKDDAAGQAIANRFTANIKGLTQASRNANDGISIAQTTEGALNEINNNLQRVRELAVQSANSTNSQSDLDSIQAEITQRLNEIDRVSGQTQFNGVKVLAQDNTLTIQVGANDGETIDIDLKQINSQTLGLDSLNVQKAYDVKDTAVTTKAYANGGGLVSLYNEKFYINNFGMMVSGLIYINDSLYYFKPPVNNLITGFVTVGDDKYYFNPINGGAASIGETIIDDKNYYFNQSGVLQTGVFSTEDGFKYFAPANTLDENLEGEAIDFTGKLIIDENIYYFDDNYRGAVEWKELDGEMHYFSPETGKAFKGLNQIGDYKYYFNSDGVMQKGFVSINDNKHYFDDSGVMKVGYTEIDGKHFYFAENGEMQIGVFNTEDGFKYFAHHNEDLGNEEGEEISYSGILNFNNKIYYFDDSFTAVVGWKDLEDGSKYYFDEDTAEAYIGLSLINDGQYYFNDDGIMQVGFVTINDKVFYFSDSGIIESGVQNIDDNYFYIDDNGIVQIGVFDTSDGYKYFAPANTVNDNIYGQAVEYSGLVRVGEDVYYFGETYTIETGWIYDMENESDKYYFNPETKKACKGINLIDDIKYYFDEKGIMRTGLISFENNNYYFNENGEMQFGYINIEDKMFYFGEDGVMQIGVFNTPDGFKYFAHQNTLDENFEGESINYTGWLDLDEKRYYFTDEYIAATGSVIIDGEEYYFDPDTAQLVISEGGGGGLVSLYNEKFYINNFGMMVSGLIYINDSLYYFKPPVNNLITGFVTVGDDKYYFNPINGGAASIGETIIDDKNYYFNQSGVLQTGVFSTEDGFKYFAPANTLDENLEGEAIDFTGKLIIDENIYYFDDNYRGAVEWKELDGEMHYFSPETGKAFKGLNQIGDYKYYFNSDGVMQKGFVSINDNKHYFDDSGVMKVGYTEIDGKHFYFAENGEMQIGVFNTEDGFKYFAHHNEDLGNEEGEEISYSGILNFNNKIYYFDDSFTAVVGWKDLEDGSKYYFDEDTAEAYIGLSLINDGQYYFNDDGIMQVGFVTINDKVFYFSDSGIIESGVQNIDDNYFYIDDNGIVQIGVFDTSDGYKYFAPANTVNDNIYGQAVEYSGLVRVGEDVYYFGETYTIETGWIYDMENESDKYYFNPETKKACKGINLIDDIKYYFDEKGIMRTGLISFENNNYYFNENGEMQFGYINIEDKMFYFGEDGVMQIGVFNTPDGFKYFAHQNTLDENFEGESINYTGWLDLDEKRYYFTDEYIAATGSVIIDGEEYYFDPDTAQLVISEGGGELKDTPAVVSADAKNALIAGGVDATDANGAELVKMSYTDKNGKTIEGGYALKAGDKYYAADYDEATGAIKAKTTSYTAADGTTKTAANQLGGVDGKTEVVTIDGKTYNASKAAGHDFKAQPELAEAAAKTTENPLQKIDAALAQVDALRSDLGAVQNRFNSAITNLGNTVNNLSEARSRIEDSDYATEVSNMSRAQILQQAGTSVLAQANQVPQNVLSLLA

SEQ ID NO: 15 - protein, 2710 aa, Artificial Sequence
  Clostridium difficile, Toxin A (TcdA), ATCC 43255
MSLISKEELIKLAYSIRPRENEYKTILTNLDEYNKLTTNNNENKYLQLKKLNESIDVFMNKYKTSSRNRALSNLKKDILKEVILIKNSNTSPVEKNLHFVWIGGEVSDIALEYIKQWADINAEYNIKLWYDSEAFLVNTLKKAIVESSTTEALQLLEEEIQNPQFDNMKFYKKRMEFIYDRQKRFINYYKSQINKPTVPTIDDIIKSHLVSEYNRDETVLESYRTNSLRKINSNHGIDIRANSLFTEQELLNIYSQELLNRGNLAAASDIVRLLALKNFGGVYLDVDMLPGIHSDLFKTISRPSSIGLDRWEMIKLEAIMKYKKYINNYTSENFDKLDQQLKDNFKLIIESKSEKSEIFSKLENLNVSDLEIKIAFALGSVINQALISKQGSYLTNLVIEQVKNRYQFLNQHLNPAIESDNNFTDTTKIFHDSLFNSATAENSMFLTKIAPYLQVGFMPEARSTISLSGPGAYASAYYDFINLQENTIEKTLKASDLIEFKFPENNLSQLTEQEINSLWSFDQASAKYQFEKYVRDYTGGSLSEDNGVDFNKNTALDKNYLLNNKIPSNNVEEAGSKNYVHYIIQLQGDDISYEATCNLFSKNPKNSIIIQRNMNESAKSYFLSDDGESILELNKYRIPERLKNKEKVKVTFIGHGKDEFNTSEFARLSVDSLSNEISSFLDTIKLDISPKNVEVNLLGCNMFSYDFNVEETYPGKLLLSIMDKITSTLPDVNKNSITIGANQYEVRINSEGRKELLAHSGKWINKEEAIMSDLSSKEYIFFDSIDNKLKAKSKNIPGLASISEDIKTLLLDASVSPDTKFILNNLKLNIESSIGDYIYYEKLEPVKNIIHNSIDDLIDEFNLLENVSDELYELKKLNNLDEKYLISFEDISKNNSTYSVRFINKSNGESVYVETEKEIFSKYSEHITKEISTIKNSIITDVNGNLLDNIQLDHTSQVNTLNAAFFIQSLIDYSSNKDVLNDLSTSVKVQLYAQLFSTGLNTIYDSIQLVNLISNAVNDTINVLPTITEGIPIVSTILDGINLGAAIKELLDEHDPLLKKELEAKVGVLAINMSLSIAATVASIVGIGAEVTIFLLPIAGISAGIPSLVNNELILHDKATSVVNYFNHLSESKKYGPLKTEDDKILVPIDDLVISEIDFNNNSIKLGTCNILAMEGGSGHTVTGNIDHFFSSPSISSHIPSLSIYSAIGIETENLDFSKKIMMLPNAPSRVFWWETGAVPGLRSLENDGTRLLDSIRDLYPGKFYWRFYAFFDYAITTLKPVYEDTNIKIKLDKDTRNFIMPTITTNEIRNKLSYSFDGAGGTYSLLLSSYPISTNINLSKDDLWIFNIDNEVREISIENGTIKKGKLIKDVLSKIDINKNKLIIGNQTIDFSGDIDNKDRYIFLTCELDDKISLIIEINLVAKSYSLLLSGDKNYLISNLSNTIEKINTLGLDSKNIAYNYTDESNNKYFGAISKTSQKSIIHYKKDSKNILEFYNDSTLEFNSKDFIAEDINVFMKDDINTITGKYYVDNNTDKSIDFSISLVSKNQVKVNGLYLNESVYSSYLDFVKNSDGHHNTSNFMNLFLDNISFWKLFGFENINFVIDKYFTLVGKTNLGYVEFICDNNKNIDIYFGEWKTSSSKSTIFSGNGRNVVVEPIYNPDTGEDISTSLDFSYEPLYGIDRYINKVLIAPDLYTSLININTNYYSNEYYPEIIVLNPNTFHKKVNINLDSSSFEYKWSTEGSDFILVRYLEESNKKILQKIRIKGILSNTQSFNKMSIDFKDIKKLSLGYIMSNFKSFNSENELDRDHLGFKIIDNKTYYYDEDSKLVKGLININNSLFYFDPIEFNLVTGWQTINGKKYYFDINTGAALTSYKIINGKHFYFNNDGVMQLGVFKGPDGFEYFAPANTQNNNIEGQAIVYQSKFLTLNGKKYYFDNNSKAVTGWRIINNEKYYFNPNNAIAAVGLQVIDNNKYYFNPDTAIISKGWQTVNGSRYYFDTDTAIAFNGYKTIDGKHFYFDSDCVVKIGVFSTSNGFEYFAPANTYNNNIEGQAIVYQSKFLTLNGKKYYFDNNSKAVTGWQTIDSKKYYFNTNTAEAATGWQTIDGKKYYFNTNTAEAATGWQTIDGKKYYFNTNTAIASTGYTIINGKHFYFNTDGIMQIGVFKGPNGFEYFAPANTDANNIEGQAILYQNEFLTLNGKKYYFGSDSKAVTGWRIINNKKYYFNPNNAIAAIHLCTINNDKYYFSYDGILQNGYITIERNNFYFDANNESKMVTGVFKGPNGFEYFAPANTHNNNIEGQAIVYQNKFLTLNGKKYYFDNDSKAVTGWQTIDGKKYYFNLNTAEAATGWQTIDGKKYYFNLNTAEAATGWQTIDGKKYYFNTNTFIASTGYTSINGKHFYFNTDGIMQIGVFKGPNGFEYFAPANTDANNIEGQAILYQNKFLTLNGKKYYFGSDSKAVTGLRTIDGKKYYFNTNTAVAVTGWQTINGKKYYFNTNTSIASTGYTIISGKHFYFNTDGIMQIGVFKGPDGFEYFAPANTDANNIEGQAIRYQNRFLYLHDNIYYFGNNSKAATGWVTIDGNRYYFEPNTAMGANGYKTIDNKNFYFRNGLPQIGVFKGSNGFEYFAPANTDANNIEGQAIRYQNRFLHLLGKIYYFGNNSKAVTGWQTINGKVYYFMPDTAMAAAGGLFEIDGVIYFFGVDGVKAPGIYG

SEQ ID NO: 16 - protein, 2366 aa, Artificial Sequence
  Clostridium difficile, Toxin B (TcdB), ATCC 43255
MSLVNRKQLEKMANVRFRTQEDEYVAILDALEEYHNMSENTVVEKYLKLKDINSLTDIYIDTYKKSGRNKALKKFKEYLVTEVLELKNNNLTPVEKNLHFVWIGGQINDTAINYINQWKDVNSDYNVNVFYDSNAFLINTLKKTVVESAINDTLESFRENLNDPRFDYNKFFRKRMEIIYDKQKNFINYYKAQREENPELIIDDIVKTYLSNEYSKEIDELNTYIEESLNKITQNSGNDVRNFEEFKNGESFNLYEQELVERWNLAAASDILRISALKEIGGMYLDVDMLPGIQPDLFESIEKPSSVTVDFWEMTKLEAIMKYKEYIPEYTSEHFDMLDEEVQSSFESVLASKSDKSEIFSSLGDMEASPLEVKIAFNSKGIINQGLISVKDSYCSNLIVKQIENRYKILNNSLNPAISEDNDFNTTTNTFIDSIMAEANADNGRFMMELGKYLRVGFFPDVKTTINLSGPEAYAAAYQDLLMFKEGSMNIHLIEADLRNFEISKTNISQSTEQEMASLWSFDDARAKAQFEEYKRNYFEGSLGEDDNLDFSQNIVVDKEYLLEKISSLARSSERGYIHYIVQLQGDKISYEAACNLFAKTPYDSVLFQKNIEDSEIAYYYNPGDGEIQEIDKYKIPSIISDRPKIKLTFIGHGKDEFNTDIFAGFDVDSLSTEIEAAIDLAKEDISPKSIEINLLGCNMFSYSINVEETYPGKLLLKVKDKISELMPSISQDSIIVSANQYEVRINSEGRRELLDHSGEWINKEESIIKDISSKEYISFNPKENKITVKSKNLPELSTLLQEIRNNSNSSDIELEEKVMLTECEINVISNIDTQIVEERIEEAKNLTSDSINYIKDEFKLIESISDALCDLKQQNELEDSHFISFEDISETDEGFSIRFINKETGESIFVETEKTIFSEYANHITEEISKIKGTIFDTVNGKLVKKVNLDTTHEVNTLNAAFFIQSLIEYNSSKESLSNLSVAMKVQVYAQLFSTGLNTITDAAKVVELVSTALDETIDLLPTLSEGLPIIATIIDGVSLGAAIKELSETSDPLLRQEIEAKIGIMAVNLTTATTAIITSSLGIASGFSILLVPLAGISAGIPSLVNNELVLRDKATKVVDYFKHVSLVETEGVFTLLDDKIMMPQDDLVISEIDFNNNSIVLGKCEIWRMEGGSGHTVTDDIDHFFSAPSITYREPHLSIYDVLEVQKEELDLSKDLMVLPNAPNRVFAWETGWTPGLRSLENDGTKLLDRIRDNYEGEFYWRYFAFIADALITTLKPRYEDTNIRINLDSNTRSFIVPIITTEYIREKLSYSFYGSGGTYALSLSQYNMGINIELSESDVWIIDVDNVVRDVTIESDKIKKGDLIEGILSTLSIEENKIILNSHEINFSGEVNGSNGFVSLTFSILEGINAIIEVDLLSKSYKLLISGELKILMLNSNHIQQKIDYIGFNSELQKNIPYSFVDSEGKENGFINGSTKEGLFVSELPDVVLISKVYMDDSKPSFGYYSNNLKDVKVITKDNVNILTGYYLKDDIKISLSLTLQDEKTIKLNSVHLDESGVAEILKFMNRKGNTNTSDSLMSFLESMNIKSIFVNFLQSNIKFILDANFIISGTTSIGQFEFICDENDNIQPYFIKFNTLETNYTLYVGNRQNMIVEPNYDLDDSGDISSTVINFSQKYLYGIDSCVNKVVISPNIYTDEINITPVYETNNTYPEVIVLDANYINEKINVNINDLSIRYVWSNDGNDFILMSTSEENKVSQVKIRFVNVFKDKTLANKLSFNFSDKQDVPVSEIILSFTPSYYEDGLIGYDLGLVSLYNEKFYINNFGMMVSGLIYINDSLYYFKPPVNNLITGFVTVGDDKYYFNPINGGAASIGETIIDDKNYYFNQSGVLQTGVFSTEDGFKYFAPANTLDENLEGEAIDFTGKLIIDENIYYFDDNYRGAVEWKELDGEMHYFSPETGKAFKGLNQIGDYKYYFNSDGVMQKGFVSINDNKHYFDDSGVMKVGYTEIDGKHFYFAENGEMQIGVFNTEDGFKYFAHHNEDLGNEEGEEISYSGILNFNNKIYYFDDSFTAVVGWKDLEDGSKYYFDEDTAEAYIGLSLINDGQYYFNDDGIMQVGFVTINDKVFYFSDSGIIESGVQNIDDNYFYIDDNGIVQIGVFDTSDGYKYFAPANTVNDNIYGQAVEYSGLVRVGEDVYYFGETYTIETGWIYDMENESDKYYFNPETKKACKGINLIDDIKYYFDEKGIMRTGLISFENNNYYFNENGEMQFGYINIEDKMFYFGEDGVMQIGVFNTPDGFKYFAHQNTLDENFEGESINYTGWLDLDEKRYYFTDEYIAATGSVIIDGEEYYFDPDTAQLVISE

SEQ ID NO: 17 - protein, 1050 aa, Artificial Sequence
  Fusion Protein STF2.GTD-A2
MAQVINTNSLSLLTQNNLNKSQSALGTAIERLSSGLRINSAKDDAAGQAIANRFTANIKGLTQASRNANDGISIAQTTEGALNEINNNLQRVRELAVQSANSTNSQSDLDSIQAEITQRLNEIDRVSGQTQFNGVKVLAQDNTLTIQVGANDGETIDIDLKQINSQTLGLDSLNVQKAYDVKDTAVTTKAYANNGTTLDVSGLDDAAIKAATGGTNGTASVTGGAVKFDADNNKYFVTIGGFTGADAAKNGDYEVNVATDGTVTLAAGATKTTMPAGATTKTEVQELKDTPAVVSADAKNALIAGGVDATDANGAELVKMSYTDKNGKTIEGGYALKAGDKYYAADYDEATGAIKAKTTSYTAADGTTKTAANQLGGVDGKTEVVTIDGKTYNASKAAGHDFKAQPELAEAAAKTTENPLQKIDAALAQVDALRSDLGAVQNRFNSAITNLGNTVNNLSEARSRIEDSDYATEVSNMSRAQILQQAGTSVLAQANQVPQNVLSLLASLISKEELIKLAYSIRPRENEYKTILTNLDEYNKLTTNNNENKYLQLKKLNESIDVFMNKYKTSSRNRALSNLKKDILKEVILIKNSNTSPVEKNLHFVWIGGEVSDIALEYIKQWADINAEYNIKLWYDSEAFLVNTLKKAIVESSTTEALQLLEEEIQNPQFDNMKFYKKRMEFIYDRQKRFINYYKSQINKPTVPTIDDIIKSHLVSEYNRDETVLESYRTNSLRKINSNHGIDIRANSLFTEQELLNIYSQELLNRGNLAAASAIVALLALKNFGGVALAVAMLPGIHSDLFKTISRPSSIGLDRWEMIKLEAIMKYKKYINNYTSENFDKLDQQLKDNFKLIIESKSEKSEIFSKLENLNVSDLEIKIAFALGSVINQALISKQGSYLTNLVIEQVKNRYQFLNQHLNPAIESDNNFTDTTKIFHDSLFNSATAENSMFLTKIAPYLQVGFMPEARSTISLSGPGAYASAYYDFINLQENTIEKTLKASDLIEFKFPENNLSQLTEQEINSLWSFDQASAKYQFEKYVRDYTGGSLSED

SEQ ID NO: 18 - protein, 1051 aa, Artificial Sequence
  Fusion Protein STF2.GTD-B2
MAQVINTNSLSLLTQNNLNKSQSALGTAIERLSSGLRINSAKDDAAGQAIANRFTANIKGLTQASRNANDGISIAQTTEGALNEINNNLQRVRELAVQSANSTNSQSDLDSIQAEITQRLNEIDRVSGQTQFNGVKVLAQDNTLTIQVGANDGETIDIDLKQINSQTLGLDSLNVQKAYDVKDTAVTTKAYANNGTTLDVSGLDDAAIKAATGGTNGTASVTGGAVKFDADNNKYFVTIGGFTGADAAKNGDYEVNVATDGTVTLAAGATKTTMPAGATTKTEVQELKDTPAVVSADAKNALIAGGVDATDANGAELVKMSYTDKNGKTIEGGYALKAGDKYYAADYDEATGAIKAKTTSYTAADGTTKTAANQLGGVDGKTEVVTIDGKTYNASKAAGHDFKAQPELAEAAAKTTENPLQKIDAALAQVDALRSDLGAVQNRFNSAITNLGNTVNNLSEARSRIEDSDYATEVSNMSRAQILQQAGTSVLAQANQVPQNVLSLLASLVNRKQLEKMANVRFRTQEDEYVAILDALEEYHNMSENTVVEKYLKLKDINSLTDIYIDTYKKSGRNKALKKFKEYLVTEVLELKNNNLTPVEKNLHFVWIGGQINDTAINYINQWKDVNSDYNVNVFYDSNAFLINTLKKTVVESAINDTLESFRENLNDPRFDYNKFFRKRMEIIYDKQKNFINYYKAQREENPELIIDDIVKTYLSNEYSKEIDELNTYIEESLNKITQNSGNDVRNFEEFKNGESFNLYEQELVERWNLAAASAILAISALKEIGGMALAVAMLPGIQPDLFESIEKPSSVTVDFWEMTKLEAIMKYKEYIPEYTSEHFDMLDEEVQSSFESVLASKSDKSEIFSSLGDMEASPLEVKIAFNSKGIINQGLISVKDSYCSNLIVKQIENRYKILNNSLNPAISEDNDFNTTTNTFIDSIMAEANADNGRFMMELGKYLRVGFFPDVKTTINLSGPEAYAAAYQDLLMFKEGSMNIHLIEADLRNFEISKTNISQSTEQEMASLWSFDDARAKAQFEEYKRNYFEGSLGED

SEQ ID NO: 19 - protein, 1097 aa, Artificial Sequence
  Fusion Protein STF2R3'(f1).GTD-A2
MAQVINTNSLSLLTQNNLNKSQSALGTAIERLSSGLRINSAKDDAAGQAIANRFTANIKGLTQASRNANDGISIAQTTEGALNEINNNLQRVRELAVQSANSTNSQSDLDSIQAEITQRLNEIDRVSGQTQFNGVKVLAQDNTLTIQVGANDGETIDIDLKQINSQTLGLDSLNVQKAYDVKDTAVTTKAYANGGGGGNRYYFEPNTAMGANGYKTIDNKNFYFRNGLPQIGVFKGSNGFEYFAPANTDANNIEGQAIRYQNRFLHLLGKIYYFGNNSKAVTGWQTINGKVYYFMPDTAMAAAGGLFEIDGVIYFFGVDGVKAPGIYGGGGGELKDTPAVVSADAKNALIAGGVDATDANGAELVKMSYTDKNGKTIEGGYALKAGDKYYAADYDEATGAIKAKTTSYTAADGTTKTAANQLGGVDGKTEVVTIDGKTYNASKAAGHDFKAQPELAEAAAKTTENPLQKIDAALAQVDALRSDLGAVQNRFNSAITNLGNTVNNLSEARSRIEDSDYATEVSNMSRAQILQQAGTSVLAQANQVPQNVLSLLASLISKEELIKLAYSIRPRENEYKTILTNLDEYNKLTTNNNENKYLQLKKLNESIDVFMNKYKTSSRNRALSNLKKDILKEVILIKNSNTSPVEKNLHFVWIGGEVSDIALEYIKQWADINAEYNIKLWYDSEAFLVNTLKKAIVESSTTEALQLLEEEIQNPQFDNMKFYKKRMEFIYDRQKRFINYYKSQINKPTVPTIDDIIKSHLVSEYNRDETVLESYRTNSLRKINSNHGIDIRANSLFTEQELLNIYSQELLNRGNLAAASAIVALLALKNFGGVALAVAMLPGIHSDLFKTISRPSSIGLDRWEMIKLEAIMKYKKYINNYTSENFDKLDQQLKDNFKLIIESKSEKSEIFSKLENLNVSDLEIKIAFALGSVINQALISKQGSYLTNLVIEQVKNRYQFLNQHLNPAIESDNNFTDTTKIFHDSLFNSATAENSMFLTKIAPYLQVGFMPEARSTISLSGPGAYASAYYDFINLQENTIEKTLKASDLIEFKFPENNLSQLTEQEINSLWSFDQASAKYQFEKYVRDYTGGSLSED

SEQ ID NO: 20 - protein, 1114 aa, Artificial Sequence
  Fusion Protein STF2R3'(f1).GTD-B2
MAQVINTNSLSLLTQNNLNKSQSALGTAIERLSSGLRINSAKDDAAGQAIANRFTANIKGLTQASRNANDGISIAQTTEGALNEINNNLQRVRELAVQSANSTNSQSDLDSIQAEITQRLNEIDRVSGQTQFNGVKVLAQDNTLTIQVGANDGETIDIDLKQINSQTLGLDSLNVQKAYDVKDTAVTTKAYANGGGGGKYYFNPETKKACKGINLIDDIKYYFDEKGIMRTGLISFENNNYYFNENGEMQFGYINIEDKMFYFGEDGVMQIGVFNTPDGFKYFAHQNTLDENFEGESINYTGWLDLDEKRYYFTDEYIAATGSVIIDGEEYYFDPDTAQLVISEGGGGELKDTPAVVSADAKNALIAGGVDATDANGAELVKMSYTDKNGKTIEGGYALKAGDKYYAADYDEATGAIKAKTTSYTAADGTTKTAANQLGGVDGKTEVVTIDGKTYNASKAAGHDFKAQPELAEAAAKTTENPLQKIDAALAQVDALRSDLGAVQNRFNSAITNLGNTVNNLSEARSRIEDSDYATEVSNMSRAQILQQAGTSVLAQANQVPQNVLSLLASLVNRKQLEKMANVRFRTQEDEYVAILDALEEYHNMSENTVVEKYLKLKDINSLTDIYIDTYKKSGRNKALKKFKEYLVTEVLELKNNNLTPVEKNLHFVWIGGQINDTAINYINQWKDVNSDYNVNVFYDSNAFLINTLKKTVVESAINDTLESFRENLNDPRFDYNKFFRKRMEIIYDKQKNFINYYKAQREENPELIIDDIVKTYLSNEYSKEIDELNTYIEESLNKITQNSGNDVRNFEEFKNGESFNLYEQELVERWNLAAASAILAISALKEIGGMALAVAMLPGIQPDLFESIEKPSSVTVDFWEMTKLEAIMKYKEYIPEYTSEHFDMLDEEVQSSFESVLASKSDKSEIFSSLGDMEASPLEVKIAFNSKGIINQGLISVKDSYCSNLIVKQIENRYKILNNSLNPAISEDNDFNTTTNTFIDSIMAEANADNGRFMMELGKYLRVGFFPDVKTTINLSGPEAYAAAYQDLLMFKEGSMNIHLIEADLRNFEISKTNISQSTEQEMASLWSFDDARAKAQFEEYKRNYFEGSLGED

SEQ ID NO: 21 - protein, 772 aa, Artificial Sequence
  Fusion Protein STF2.CPD-A2
MAQVINTNSLSLLTQNNLNKSQSALGTAIERLSSGLRINSAKDDAAGQAIANRFTANIKGLTQASRNANDGISIAQTTEGALNEINNNLQRVRELAVQSANSTNSQSDLDSIQAEITQRLNEIDRVSGQTQFNGVKVLAQDNTLTIQVGANDGETIDIDLKQINSQTLGLDSLNVQKAYDVKDTAVTTKAYANNGTTLDVSGLDDAAIKAATGGTNGTASVTGGAVKFDADNNKYFVTIGGFTGADAAKNGDYEVNVATDGTVTLAAGATKTTMPAGATTKTEVQELKDTPAVVSADAKNALIAGGVDATDANGAELVKMSYTDKNGKTIEGGYALKAGDKYYAADYDEATGAIKAKTTSYTAADGTTKTAANQLGGVDGKTEVVTIDGKTYNASKAAGHDFKAQPELAEAAAKTTENPLQKIDAALAQVDALRSDLGAVQNRFNSAITNLGNTVNNLSEARSRIEDSDYATEVSNMSRAQILQQAGTSVLAQANQVPQNVLSLLASEDNGVDFNKNTALDKNYLLNNKIPSNNVEEAGSKNYVHYIIQLQGADISYEATCNLFSKNPKNSIIIQRNMNESAKSYFLSDDGESILELNKYRIPERLKNKEKVKVTFIGAGKDEFNTSEFARLSVDSLSNEISSFLDTIKLDISPKNVEVNLLGANMFSYDFNVEETYPGKLLLSIMDKITSTLPDVNKNSITIGANQYEVRINSEGRKELLAHSGKWINKEEAIMSDLSSKEYIFFDSIDNKLKAKSKNIPGLASISEDIKT

SEQ ID NO: 22 - protein, 769 aa, Artificial Sequence
  Fusion Protein STF2.CPD-B2
MAQVINTNSLSLLTQNNLNKSQSALGTAIERLSSGLRINSAKDDAAGQAIANRFTANIKGLTQASRNANDGISIAQTTEGALNEINNNLQRVRELAVQSANSTNSQSDLDSIQAEITQRLNEIDRVSGQTQFNGVKVLAQDNTLTIQVGANDGETIDIDLKQINSQTLGLDSLNVQKAYDVKDTAVTTKAYANNGTTLDVSGLDDAAIKAATGGTNGTASVTGGAVKFDADNNKYFVTIGGFTGADAAKNGDYEVNVATDGTVTLAAGATKTTMPAGATTKTEVQELKDTPAVVSADAKNALIAGGVDATDANGAELVKMSYTDKNGKTIEGGYALKAGDKYYAADYDEATGAIKAKTTSYTAADGTTKTAANQLGGVDGKTEVVTIDGKTYNASKAAGHDFKAQPELAEAAAKTTENPLQKIDAALAQVDALRSDLGAVQNRFNSAITNLGNTVNNLSEARSRIEDSDYATEVSNMSRAQILQQAGTSVLAQANQVPQNVLSLLAGEDDNLDFSQNIVVDKEYLLEKISSLARSSERGYIHYIVQLQGAKISYEAACNLFAKTPYDSVLFQKNIEDSEIAYYYNPGDGEIQEIDKYKIPSIISDRPKIKLTFIGAGKDEFNTDIFAGFDVDSLSTEIEAAIDLAKEDISPKSIEINLLGANMFSYSINVEETYPGKLLLKVKDKISELMPSISQDSIIVSANQYEVRINSEGRRELLDHSGEWINKEESIIKDISSKEYISFNPKENKITVKSKNLPELSTLLQEIRN

SEQ ID NO: 23 - protein, 819 aa, Artificial Sequence
  Fusion Protein STF2R3'(f1).CPD-A2
MAQVINTNSLSLLTQNNLNKSQSALGTAIERLSSGLRINSAKDDAAGQAIANRFTANIKGLTQASRNANDGISIAQTTEGALNEINNNLQRVRELAVQSANSTNSQSDLDSIQAEITQRLNEIDRVSGQTQFNGVKVLAQDNTLTIQVGANDGETIDIDLKQINSQTLGLDSLNVQKAYDVKDTAVTTKAYANGGGGGNRYYFEPNTAMGANGYKTIDNKNFYFRNGLPQIGVFKGSNGFEYFAPANTDANNIEGQAIRYQNRFLHLLGKIYYFGNNSKAVTGWQTINGKVYYFMPDTAMAAAGGLFEIDGVIYFFGVDGVKAPGIYGGGGGELKDTPAVVSADAKNALIAGGVDATDANGAELVKMSYTDKNGKTIEGGYALKAGDKYYAADYDEATGAIKAKTTSYTAADGTTKTAANQLGGVDGKTEVVTIDGKTYNASKAAGHDFKAQPELAEAAAKTTENPLQKIDAALAQVDALRSDLGAVQNRFNSAITNLGNTVNNLSEARSRIEDSDYATEVSNMSRAQILQQAGTSVLAQANQVPQNVLSLLASEDNGVDFNKNTALDKNYLLNNKIPSNNVEEAGSKNYVHYIIQLQGADISYEATCNLFSKNPKNSIIIQRNMNESAKSYFLSDDGESILELNKYRIPERLKNKEKVKVTFIGAGKDEFNTSEFARLSVDSLSNEISSFLDTIKLDISPKNVEVNLLGANMFSYDFNVEETYPGKLLLSIMDKITSTLPDVNKNSITIGANQYEVRINSEGRKELLAHSGKWINKEEAIMSDLSSKEYIFFDSIDNKLKAKSKNIPGLASISEDIKT

SEQ ID NO: 24 - protein, 832 aa, Artificial Sequence
  Fusion Protein STF2R3'(f1).CPD-B2
MAQVINTNSLSLLTQNNLNKSQSALGTAIERLSSGLRINSAKDDAAGQAIANRFTANIKGLTQASRNANDGISIAQTTEGALNEINNNLQRVRELAVQSANSTNSQSDLDSIQAEITQRLNEIDRVSGQTQFNGVKVLAQDNTLTIQVGANDGETIDIDLKQINSQTLGLDSLNVQKAYDVKDTAVTTKAYANGGGGGKYYFNPETKKACKGINLIDDIKYYFDEKGIMRTGLISFENNNYYFNENGEMQFGYINIEDKMFYFGEDGVMQIGVFNTPDGFKYFAHQNTLDENFEGESINYTGWLDLDEKRYYFTDEYIAATGSVIIDGEEYYFDPDTAQLVISEGGGGELKDTPAVVSADAKNALIAGGVDATDANGAELVKMSYTDKNGKTIEGGYALKAGDKYYAADYDEATGAIKAKTTSYTAADGTTKTAANQLGGVDGKTEVVTIDGKTYNASKAAGHDFKAQPELAEAAAKTTENPLQKIDAALAQVDALRSDLGAVQNRFNSAITNLGNTVNNLSEARSRIEDSDYATEVSNMSRAQILQQAGTSVLAQANQVPQNVLSLLAGEDDNLDFSQNIVVDKEYLLEKISSLARSSERGYIHYIVQLQGAKISYEAACNLFAKTPYDSVLFQKNIEDSEIAYYYNPGDGEIQEIDKYKIPSIISDRPKIKLTFIGAGKDEFNTDIFAGFDVDSLSTEIEAAIDLAKEDISPKSIEINLLGANMFSYSINVEETYPGKLLLKVKDKISELMPSISQDSIIVSANQYEVRINSEGRRELLDHSGEWINKEESIIKDISSKEYISFNPKENKITVKSKNLPELSTLLQEIRN

SEQ ID NO: 25 - protein, 1405 aa, Artificial Sequence
  Fusion Protein STF2.RBD-A2, HL928
MAQVINTNSLSLLTQNNLNKSQSALGTAIERLSSGLRINSAKDDAAGQAIANRFTANIKGLTQASRNANDGISIAQTTEGALNEINNNLQRVRELAVQSANSTNSQSDLDSIQAEITQRLNEIDRVSGQTQFNGVKVLAQDNTLTIQVGANDGETIDIDLKQINSQTLGLDSLNVQKAYDVKDTAVTTKAYANNGTTLDVSGLDDAAIKAATGGTNGTASVTGGAVKFDADNNKYFVTIGGFTGADAAKNGDYEVNVATDGTVTLAAGATKTTMPAGATTKTEVQELKDTPAVVSADAKNALIAGGVDATDANGAELVKMSYTDKNGKTIEGGYALKAGDKYYAADYDEATGAIKAKTTSYTAADGTTKTAANQLGGVDGKTEVVTIDGKTYNASKAAGHDFKAQPELAEAAAKTTENPLQKIDAALAQVDALRSDLGAVQNRFNSAITNLGNTVNNLSEARSRIEDSDYATEVSNMSRAQILQQAGTSVLAQANQVPQNVLSLLAGFKIIDNKTYYYDEDSKLVKGLININNSLFYFDPIEFNLVTGWQTINGKKYYFDINTGAALTSYKIINGKHFYFNNDGVMQLGVFKGPDGFEYFAPANTQNNNIEGQAIVYQSKFLTLNGKKYYFDNNSKAVTGWRIINNEKYYFNPNNAIAAVGLQVIDNNKYYFNPDTAIISKGWQTVNGSRYYFDTDTAIAFNGYKTIDGKHFYFDSDCVVKIGVFSTSNGFEYFAPANTYNNNIEGQAIVYQSKFLTLNGKKYYFDNNSKAVTGWQTIDSKKYYFNTNTAEAATGWQTIDGKKYYFNTNTAEAATGWQTIDGKKYYFNTNTAIASTGYTIINGKHFYFNTDGIMQIGVFKGPNGFEYFAPANTDANNIEGQAILYQNEFLTLNGKKYYFGSDSKAVTGWRIINNKKYYFNPNNAIAAIHLCTINNDKYYFSYDGILQNGYITIERNNFYFDANNESKMVTGVFKGPNGFEYFAPANTHNNNIEGQAIVYQNKFLTLNGKKYYFDNDSKAVTGWQTIDGKKYYFNLNTAEAATGWQTIDGKKYYFNLNTAEAATGWQTIDGKKYYFNTNTFIASTGYTSINGKHFYFNTDGIMQIGVFKGPNGFEYFAPANTDANNIEGQAILYQNKFLTLNGKKYYFGSDSKAVTGLRTIDGKKYYFNTNTAVAVTGWQTINGKKYYFNTNTSIASTGYTIISGKHFYFNTDGIMQIGVFKGPDGFEYFAPANTDANNIEGQAIRYQNRFLYLHDNIYYFGNNSKAATGWVTIDGNRYYFEPNTAMGANGYKTIDNKNFYFRNGLPQIGVFKGSNGFEYFAPANTDANNIEGQAIRYQNRFLHLLGKIYYFGNNSKAVTGWQTINGKVYYFMPDTAMAAAGGLFEIDGVIYFFGVDGVKAPGIYG

SEQ ID NO: 26 - protein, 1059 aa, Artificial Sequence
  Fusion Protein STF2.RBD-B2, HL 929
MAQVINTNSLSLLTQNNLNKSQSALGTAIERLSSGLRINSAKDDAAGQAIANRFTANIKGLTQASRNANDGISIAQTTEGALNEINNNLQRVRELAVQSANSTNSQSDLDSIQAEITQRLNEIDRVSGQTQFNGVKVLAQDNTLTIQVGANDGETIDIDLKQINSQTLGLDSLNVQKAYDVKDTAVTTKAYANNGTTLDVSGLDDAAIKAATGGTNGTASVTGGAVKFDADNNKYFVTIGGFTGADAAKNGDYEVNVATDGTVTLAAGATKTTMPAGATTKTEVQELKDTPAVVSADAKNALIAGGVDATDANGAELVKMSYTDKNGKTIEGGYALKAGDKYYAADYDEATGAIKAKTTSYTAADGTTKTAANQLGGVDGKTEVVTIDGKTYNASKAAGHDFKAQPELAEAAAKTTENPLQKIDAALAQVDALRSDLGAVQNRFNSAITNLGNTVNNLSEARSRIEDSDYATEVSNMSRAQILQQAGTSVLAQANQVPQNVLSLLAGLVSLYNEKFYINNFGMMVSGLIYINDSLYYFKPPVNNLITGFVTVGDDKYYFNPINGGAASIGETIIDDKNYYFNQSGVLQTGVFSTEDGFKYFAPANTLDENLEGEAIDFTGKLIIDENIYYFDDNYRGAVEWKELDGEMHYFSPETGKAFKGLNQIGDYKYYFNSDGVMQKGFVSINDNKHYFDDSGVMKVGYTEIDGKHFYFAENGEMQIGVFNTEDGFKYFAHHNEDLGNEEGEEISYSGILNFNNKIYYFDDSFTAVVGWKDLEDGSKYYFDEDTAEAYIGLSLINDGQYYFNDDGIMQVGFVTINDKVFYFSDSGIIESGVQNIDDNYFYIDDNGIVQIGVFDTSDGYKYFAPANTVNDNIYGQAVEYSGLVRVGEDVYYFGETYTIETGWIYDMENESDKYYFNPETKKACKGINLIDDIKYYFDEKGIMRTGLISFENNNYYFNENGEMQFGYINIEDKMFYFGEDGVMQIGVFNTPDGFKYFAHQNTLDENFEGESINYTGWLDLDEKRYYFTDEYIAATGSVIIDGEEYYFDPDTAQLVISE

SEQ ID NO: 27 - protein, 1167 aa, Artificial Sequence
  Fusion Protein STF2 delta.RBD-A2
MAQVINTNSLSLLTQNNLNKSQSALGTAIERLSSGLRINSAKDDAAGQAIANRFTANIKGLTQASRNANDGISIAQTTEGALNEINNNLQRVRELAVQSANSTNSQSDLDSIQAEITQRLNEIDRVSGQTQFNGVKVLAQDNTLTIQVGANDGETIDIDLKQINSQTLGLDSLNVQTTENPLQKIDAALAQVDALRSDLGAVQNRFNSAITNLGNTVNNLSEARSRIEDSDYATEVSNMSRAQILQQAGTSVLAQANQVPQNVLSLLAGFKIIDNKTYYYDEDSKLVKGLININNSLFYFDPIEFNLVTGWQTINGKKYYFDINTGAALTSYKIINGKHFYFNNDGVMQLGVFKGPDGFEYFAPANTQNNNIEGQAIVYQSKFLTLNGKKYYFDNNSKAVTGWRIINNEKYYFNPNNAIAAVGLQVIDNNKYYFNPDTAIISKGWQTVNGSRYYFDTDTAIAFNGYKTIDGKHFYFDSDCVVKIGVFSTSNGFEYFAPANTYNNNIEGQAIVYQSKFLTLNGKKYYFDNNSKAVTGWQTIDSKKYYFNTNTAEAATGWQTIDGKKYYFNTNTAEAATGWQTIDGKKYYFNTNTAIASTGYTIINGKHFYFNTDGIMQIGVFKGPNGFEYFAPANTDANNIEGQAILYQNEFLTLNGKKYYFGSDSKAVTGWRIINNKKYYFNPNNAIAAIHLCTINNDKYYFSYDGILQNGYITIERNNFYFDANNESKMVTGVFKGPNGFEYFAPANTHNNNIEGQAIVYQNKFLTLNGKKYYFDNDSKAVTGWQTIDGKKYYFNLNTAEAATGWQTIDGKKYYFNLNTAEAATGWQTIDGKKYYFNTNTFIASTGYTSINGKHFYFNTDGIMQIGVFKGPNGFEYFAPANTDANNIEGQAILYQNKFLTLNGKKYYFGSDSKAVTGLRTIDGKKYYFNTNTAVAVTGWQTINGKKYYFNTNTSIASTGYTIISGKHFYFNTDGIMQIGVFKGPDGFEYFAPANTDANNIEGQAIRYQNRFLYLHDNIYYFGNNSKAATGWVTIDGNRYYFEPNTAMGANGYKTIDNKNFYFRNGLPQIGVFKGSNGFEYFAPANTDANNIEGQAIRYQNRFLHLLGKIYYFGNNSKAVTGWQTINGKVYYFMPDTAMAAAGGLFEIDGVIYFFGVDGVKAPGIYG

SEQ ID NO: 28 - protein, 821 aa, Artificial Sequence
  Fusion Protein STF2DELTA.RBD-B2
MAQVINTNSLSLLTQNNLNKSQSALGTAIERLSSGLRINSAKDDAAGQAIANRFTANIKGLTQASRNANDGISIAQTTEGALNEINNNLQRVRELAVQSANSTNSQSDLDSIQAEITQRLNEIDRVSGQTQFNGVKVLAQDNTLTIQVGANDGETIDIDLKQINSQTLGLDSLNVQTTENPLQKIDAALAQVDALRSDLGAVQNRFNSAITNLGNTVNNLSEARSRIEDSDYATEVSNMSRAQILQQAGTSVLAQANQVPQNVLSLLAGLVSLYNEKFYINNFGMMVSGLIYINDSLYYFKPPVNNLITGFVTVGDDKYYFNPINGGAASIGETIIDDKNYYFNQSGVLQTGVFSTEDGFKYFAPANTLDENLEGEAIDFTGKLIIDENIYYFDDNYRGAVEWKELDGEMHYFSPETGKAFKGLNQIGDYKYYFNSDGVMQKGFVSINDNKHYFDDSGVMKVGYTEIDGKHFYFAENGEMQIGVFNTEDGFKYFAHHNEDLGNEEGEEISYSGILNFNNKIYYFDDSFTAVVGWKDLEDGSKYYFDEDTAEAYIGLSLINDGQYYFNDDGIMQVGFVTINDKVFYFSDSGIIESGVQNIDDNYFYIDDNGIVQIGVFDTSDGYKYFAPANTVNDNIYGQAVEYSGLVRVGEDVYYFGETYTIETGWIYDMENESDKYYFNPETKKACKGINLIDDIKYYFDEKGIMRTGLISFENNNYYFNENGEMQFGYINIEDKMFYFGEDGVMQIGVFNTPDGFKYFAHQNTLDENFEGESINYTGWLDLDEKRYYFTDEYIAATGSVIIDGEEYYFDPDTAQLVISE

SEQ ID NO: 29 - protein, 1106 aa, Artificial Sequence
  Fusion Protein STF2R3'(f1-A).C.RBD-B2
MAQVINTNSLSLLTQNNLNKSQSALGTAIERLSSGLRINSAKDDAAGQAIANRFTANIKGLTQASRNANDGISIAQTTEGALNEINNNLQRVRELAVQSANSTNSQSDLDSIQAEITQRLNEIDRVSGQTQFNGVKVLAQDNTLTIQVGANDGETIDIDLKQINSQTLGLDSLNVQKAYDVKDTAVTTKAYANGGGGGNRYYFEPNTAMGANGYKTIDNKNFYFRNGLPQIGVFKGSNGFEYFAPANTDANNIEGQAIRYQNRFLHLLGKIYYFGNNSKAVTGWQTINGKVYYFMPDTAMAAAGGLFEIDGVIYFFGVDGVKAPGIYGGGGGELKDTPAVVSADAKNALIAGGVDATDANGAELVKMSYTDKNGKTIEGGYALKAGDKYYAADYDEATGAIKAKTTSYTAADGTTKTAANQLGGVDGKTEVVTIDGKTYNASKAAGHDFKAQPELAEAAAKTTENPLQKIDAALAQVDALRSDLGAVQNRFNSAITNLGNTVNNLSEARSRIEDSDYATEVSNMSRAQILQQAGTSVLAQANQVPQNVLSLLAGLVSLYNEKFYINNFGMMVSGLIYINDSLYYFKPPVNNLITGFVTVGDDKYYFNPINGGAASIGETIIDDKNYYFNQSGVLQTGVFSTEDGFKYFAPANTLDENLEGEAIDFTGKLIIDENIYYFDDNYRGAVEWKELDGEMHYFSPETGKAFKGLNQIGDYKYYFNSDGVMQKGFVSINDNKHYFDDSGVMKVGYTEIDGKHFYFAENGEMQIGVFNTEDGFKYFAHHNEDLGNEEGEEISYSGILNFNNKIYYFDDSFTAVVGWKDLEDGSKYYFDEDTAEAYIGLSLINDGQYYFNDDGIMQVGFVTINDKVFYFSDSGIIESGVQNIDDNYFYIDDNGIVQIGVFDTSDGYKYFAPANTVNDNIYGQAVEYSGLVRVGEDVYYFGETYTIETGWIYDMENESDKYYFNPETKKACKGINLIDDIKYYFDEKGIMRTGLISFENNNYYFNENGEMQFGYINIEDKMFYFGEDGVMQIGVFNTPDGFKYFAHQNTLDENFEGESINYTGWLDLDEKRYYFTDEYIAATGSVIIDGEEYYFDPDTAQLVISE

SEQ ID NO: 30 - protein, 1468 aa, Artificial Sequence
  Fusion Protein STF2R3'(f1-B).C.RBD-A2
MAQVINTNSLSLLTQNNLNKSQSALGTAIERLSSGLRINSAKDDAAGQAIANRFTANIKGLTQASRNANDGISIAQTTEGALNEINNNLQRVRELAVQSANSTNSQSDLDSIQAEITQRLNEIDRVSGQTQFNGVKVLAQDNTLTIQVGANDGETIDIDLKQINSQTLGLDSLNVQKAYDVKDTAVTTKAYANGGGGGKYYFNPETKKACKGINLIDDIKYYFDEKGIMRTGLISFENNNYYFNENGEMQFGYINIEDKMFYFGEDGVMQIGVFNTPDGFKYFAHQNTLDENFEGESINYTGWLDLDEKRYYFTDEYIAATGSVIIDGEEYYFDPDTAQLVISEGGGGELKDTPAVVSADAKNALIAGGVDATDANGAELVKMSYTDKNGKTIEGGYALKAGDKYYAADYDEATGAIKAKTTSYTAADGTTKTAANQLGGVDGKTEVVTIDGKTYNASKAAGHDFKAQPELAEAAAKTTENPLQKIDAALAQVDALRSDLGAVQNRFNSAITNLGNTVNNLSEARSRIEDSDYATEVSNMSRAQILQQAGTSVLAQANQVPQNVLSLLAGFKIIDNKTYYYDEDSKLVKGLININNSLFYFDPIEFNLVTGWQTINGKKYYFDINTGAALTSYKIINGKHFYFNNDGVMQLGVFKGPDGFEYFAPANTQNNNIEGQAIVYQSKFLTLNGKKYYFDNNSKAVTGWRIINNEKYYFNPNNAIAAVGLQVIDNNKYYFNPDTAIISKGWQTVNGSRYYFDTDTAIAFNGYKTIDGKHFYFDSDCVVKIGVFSTSNGFEYFAPANTYNNNIEGQAIVYQSKFLTLNGKKYYFDNNSKAVTGWQTIDSKKYYFNTNTAEAATGWQTIDGKKYYFNTNTAEAATGWQTIDGKKYYFNTNTAIASTGYTIINGKHFYFNTDGIMQIGVFKGPNGFEYFAPANTDANNIEGQAILYQNEFLTLNGKKYYFGSDSKAVTGWRIINNKKYYFNPNNAIAAIHLCTINNDKYYFSYDGILQNGYITIERNNFYFDANNESKMVTGVFKGPNGFEYFAPANTHNNNIEGQAIVYQNKFLTLNGKKYYFDNDSKAVTGWQTIDGKKYYFNLNTAEAATGWQTIDGKKYYFNLNTAEAATGWQTIDGKKYYFNTNTFIASTGYTSINGKHFYFNTDGIMQIGVFKGPNGFEYFAPANTDANNIEGQAILYQNKFLTLNGKKYYFGSDSKAVTGLRTIDGKKYYFNTNTAVAVTGWQTINGKKYYFNTNTSIASTGYTIISGKHFYFNTDGIMQIGVFKGPDGFEYFAPANTDANNIEGQAIRYQNRFLYLHDNIYYFGNNSKAATGWVTIDGNRYYFEPNTAMGANGYKTIDNKNFYFRNGLPQIGVFKGSNGFEYFAPANTDANNIEGQAIRYQNRFLHLLGKIYYFGNNSKAVTGWQTINGKVYYFMPDTAMAAAGGLFEIDGVIYFFGVDGVKAPGIYG

SEQ ID NO: 31 - protein, 938 aa, Artificial Sequence
  Fusion Protein STF2R3'(f1).RBD
MAQVINTNSLSLLTQNNLNKSQSALGTAIERLSSGLRINSAKDDAAGQAIANRFTANIKGLTQASRNANDGISIAQTTEGALNEINNNLQRVRELAVQSANSTNSQSDLDSIQAEITQRLNEIDRVSGQTQFNGVKVLAQDNTLTIQVGANDGETIDIDLKQINSQTLGLDSLNVQKAYDVKDTAVTTKAYANGGGGGNRYYFEPNTAMGANGYKTIDNKNFYFRNGLPQIGVFKGSNGFEYFAPANTDANNIEGQAIRYQNRFLHLLGKIYYFGNNSKAVTGWQTINGKVYYFMPDTAMAAAGGLFEIDGVIYFFGVDGVKAPGIYGGGGGELKDTPAVVSADAKNALIAGGVDATDANGAELVKMSYTDKNGKTIEGGYALKAGDKYYAADYDEATGAIKAKTTSYTAADGTTKTAANQLGGVDGKTEVVTIDGKTYNASKAAGHDFKAQPELAEAAAKTTENPLQKIDAALAQVDALRSDLGAVQNRFNSAITNLGNTVNNLSEARSRIEDSDYATEVSNMSRAQILQQAGTSVLAQANQVPQNVLSLLAISKGWQTVNGSRYYFDTDTAIAFNGYKTIDGKHFYFDSDCVVKIGVFSTSNGFEYFAPANTYNNNIEGQAIVYQSKFLTLNGKKYYFDNNSKAVTGWQTIDSKKYYFNTNTAEAATGWQTIDGKKYYFNTNTAEAATGWQTIDGKKYYFNTNTAIASTGYTIINGKHFYFNTDGIMQIGVFKGPNGFEYFAPANTDANNIEGQAILYQNEFLTLNGKKYYFGSDSKAVTGWRIINNKKYYFNPNNAIAAIHLCTINNDKYYFSYDGILQNGYITIERNNFYFDANNESKMVTGVFKGPNGFEYFAPANTHNNNIEGQAIVYQNKFLTLNGKKYYFDNDSKAVTGWQTIDGKKYYFNLNTAEAATGWQTIDGKKYYFNLNTAEAAT

SEQ ID NO: 32 - protein, 1050 aa, Artificial Sequence
  Fusion Protein STF2.GTD-A1
MAQVINTNSLSLLTQNNLNKSQSALGTAIERLSSGLRINSAKDDAAGQAIANRFTANIKGLTQASRNANDGISIAQTTEGALNEINNNLQRVRELAVQSANSTNSQSDLDSIQAEITQRLNEIDRVSGQTQFNGVKVLAQDNTLTIQVGANDGETIDIDLKQINSQTLGLDSLNVQKAYDVKDTAVTTKAYANNGTTLDVSGLDDAAIKAATGGTNGTASVTGGAVKFDADNNKYFVTIGGFTGADAAKNGDYEVNVATDGTVTLAAGATKTTMPAGATTKTEVQELKDTPAVVSADAKNALIAGGVDATDANGAELVKMSYTDKNGKTIEGGYALKAGDKYYAADYDEATGAIKAKTTSYTAADGTTKTAANQLGGVDGKTEVVTIDGKTYNASKAAGHDFKAQPELAEAAAKTTENPLQKADAALAQVDALRSDLGAVQNRFNSAITNLGNTVNNLSEARSRIEDSDYATEVSNMSRAQILQQAGTSVLAQANQVPQNVLSLLASLISKEELIKLAYSIRPRENEYKTILTNLDEYNKLTTNNNENKYLQLKKLNESIDVFMNKYKTSSRNRALSNLKKDILKEVILIKNSNTSPVEKNLHFVWIGGEVSDIALEYIKQWADINAEYNIKLWYDSEAFLVNTLKKAIVESSTTEALQLLEEEIQNPQFDNMKFYKKRMEFIYDRQKRFINYYKSQINKPTVPTIDDIIKSHLVSEYNRDETVLESYRTNSLRKINSNHGIDIRANSLFTEQELLNIYSQELLNRGNLAAASNIVRLLALKNFGGVYLNVDMLPGIHSDLFKTISRPSSIGLDRWEMIKLEAIMKYKKYINNYTSENFDKLDQQLKDNFKLIIESKSEKSEIFSKLENLNVSDLEIKIAFALGSVINQALISKQGSYLTNLVIEQVKNRYQFLNQHLNPAIESDNNFTDTTKIFHDSLFNSATAENSMFLTKIAPYLQVGFMPEARSTISLSGPGAYASAYYDFINLQENTIEKTLKASDLIEFKFPENNLSQLTEQEINSLWSFDQASAKYQFEKYVRDYTGGSLSED

SEQ ID NO: 33 - protein, 949 aa, Artificial Sequence
  Fusion Protein STF2.GTD-A1
MAQVINTNSLSLLTQNNLNKSQSALGTAIERLSSGLRINSAKDDAAGQAIANRFTANIKGLTQASRNANDGISIAQTTEGALNEINNNLQRVRELAVQSANSTNSQSDLDSIQAEITQRLNEIDRVSGQTQFNGVKVLAQDNTLTIQVGANDGETIDIDLKQINSQTLGLDSLNVQKAYDVKDTAVTTKAAVVSADAKNALIAGGVDATDANGAELVKMSYTDKNGKTIEGGYALKAGDKYYAADYDEATGAIKAKTTSYTAADGTTKTAANQLGGVDGKTEVVTIDGKTYNASKAAGHDFKAQPELAEAAAKTTENPLQKADAALAQVDALRSDLGAVQNRFNSAITNLGNTVNNLSEARSRIEDSDYATEVSNMSRAQILQQAGTSVLAQANQVPQNVLSLLASLISKEELIKLAYSIRPRENEYKTILTNLDEYNKLTTNNNENKYLQLKKLNESIDVFMNKYKTSSRNRALSNLKKDILKEVILIKNSNTSPVEKNLHFVWIGGEVSDIALEYIKQWADINAEYNIKLWYDSEAFLVNTLKKAIVESSTTEALQLLEEEIQNPQFDNMKFYKKRMEFIYDRQKRFINYYKSQINKPTVPTIDDIIKSHLVSEYNRDETVLESYRTNSLRKINSNHGIDIRANSLFTEQELLNIYSQELLNRGNLAAASNIVRLLALKNFGGVYLNVDMLPGIHSDLFKTISRPSSIGLDRWEMIKLEAIMKYKKYINNYTSENFDKLDQQLKDNFKLIIESKSEKSEIFSKLENLNVSDLEIKIAFALGSVINQALISKQGSYLTNLVIEQVKNRYQFLNQHLNPAIESDNNFTDTTKIFHDSLFNSATAENSMFLTKIAPYLQVGFMPEARSTISLSGPGAYASAYYDFINLQENTIEKTLKASDLIEFKFPENNLSQLTEQEINSLWSFDQASAKYQFEKYVRDYTGGSLSED

SEQ ID NO: 34 - protein, 1051 aa, Artificial Sequence
  Fusion Protein STF2.GTD-B1
MAQVINTNSLSLLTQNNLNKSQSALGTAIERLSSGLRINSAKDDAAGQAIANRFTANIKGLTQASRNANDGISIAQTTEGALNEINNNLQRVRELAVQSANSTNSQSDLDSIQAEITQRLNEIDRVSGQTQFNGVKVLAQDNTLTIQVGANDGETIDIDLKQINSQTLGLDSLNVQKAYDVKDTAVTTKAYANNGTTLDVSGLDDAAIKAATGGTNGTASVTGGAVKFDADNNKYFVTIGGFTGADAAKNGDYEVNVATDGTVTLAAGATKTTMPAGATTKTEVQELKDTPAVVSADAKNALIAGGVDATDANGAELVKMSYTDKNGKTIEGGYALKAGDKYYAADYDEATGAIKAKTTSYTAADGTTKTAANQLGGVDGKTEVVTIDGKTYNASKAAGHDFKAQPELAEAAAKTTENPLQKADAALAQVDALRSDLGAVQNRFNSAITNLGNTVNNLSEARSRIEDSDYATEVSNMSRAQILQQAGTSVLAQANQVPQNVLSLLASLVNRKQLEKMANVRFRTQEDEYVAILDALEEYHNMSENTVVEKYLKLKDINSLTDIYIDTYKKSGRNKALKKFKEYLVTEVLELKNNNLTPVEKNLHFVWIGGQINDTAINYINQWKDVNSDYNVNVFYDSNAFLINTLKKTVVESAINDTLESFRENLNDPRFDYNKFFRKRMEIIYDKQKNFINYYKAQREENPELIIDDIVKTYLSNEYSKEIDELNTYIEESLNKITQNSGNDVRNFEEFKNGESFNLYEQELVERWNLAAASNILRISALKEIGGMYLNVDMLPGIQPDLFESIEKPSSVTVDFWEMTKLEAIMKYKEYIPEYTSEHFDMLDEEVQSSFESVLASKSDKSEIFSSLGDMEASPLEVKIAFNSKGIINQGLISVKDSYCSNLIVKQIENRYKILNNSLNPAISEDNDFNTTTNTFIDSIMAEANADNGRFMMELGKYLRVGFFPDVKTTINLSGPEAYAAAYQDLLMFKEGSMNIHLIEADLRNFEISKTNISQSTEQEMASLWSFDDARAKAQFEEYKRNYFEGSLGED

SEQ ID NO: 35 - protein, 950 aa, Artificial Sequence
  Fusion Protein STF2.GTD-B1
MAQVINTNSLSLLTQNNLNKSQSALGTAIERLSSGLRINSAKDDAAGQAIANRFTANIKGLTQASRNANDGISIAQTTEGALNEINNNLQRVRELAVQSANSTNSQSDLDSIQAEITQRLNEIDRVSGQTQFNGVKVLAQDNTLTIQVGANDGETIDIDLKQINSQTLGLDSLNVQKAYDVKDTAVTTKAAVVSADAKNALIAGGVDATDANGAELVKMSYTDKNGKTIEGGYALKAGDKYYAADYDEATGAIKAKTTSYTAADGTTKTAANQLGGVDGKTEVVTIDGKTYNASKAAGHDFKAQPELAEAAAKTTENPLQKADAALAQVDALRSDLGAVQNRFNSAITNLGNTVNNLSEARSRIEDSDYATEVSNMSRAQILQQAGTSVLAQANQVPQNVLSLLASLVNRKQLEKMANVRFRTQEDEYVAILDALEEYHNMSENTVVEKYLKLKDINSLTDIYIDTYKKSGRNKALKKFKEYLVTEVLELKNNNLTPVEKNLHFVWIGGQINDTAINYINQWKDVNSDYNVNVFYDSNAFLINTLKKTVVESAINDTLESFRENLNDPRFDYNKFFRKRMEIIYDKQKNFINYYKAQREENPELIIDDIVKTYLSNEYSKEIDELNTYIEESLNKITQNSGNDVRNFEEFKNGESFNLYEQELVERWNLAAASNILRISALKEIGGMYLNVDMLPGIQPDLFESIEKPSSVTVDFWEMTKLEAIMKYKEYIPEYTSEHFDMLDEEVQSSFESVLASKSDKSEIFSSLGDMEASPLEVKIAFNSKGIINQGLISVKDSYCSNLIVKQIENRYKILNNSLNPAISEDNDFNTTTNTFIDSIMAEANADNGRFMMELGKYLRVGFFPDVKTTINLSGPEAYAAAYQDLLMFKEGSMNIHLIEADLRNFEISKTNISQSTEQEMASLWSFDDARAKAQFEEYKRNYFEGSLGED

SEQ ID NO: 36 - protein, 1050 aa, Artificial Sequence
  Fusion Protein STF2.GTD-A2
MAQVINTNSLSLLTQNNLNKSQSALGTAIERLSSGLRINSAKDDAAGQAIANRFTANIKGLTQASRNANDGISIAQTTEGALNEINNNLQRVRELAVQSANSTNSQSDLDSIQAEITQRLNEIDRVSGQTQFNGVKVLAQDNTLTIQVGANDGETIDIDLKQINSQTLGLDSLNVQKAYDVKDTAVTTKAYANNGTTLDVSGLDDAAIKAATGGTNGTASVTGGAVKFDADNNKYFVTIGGFTGADAAKNGDYEVNVATDGTVTLAAGATKTTMPAGATTKTEVQELKDTPAVVSADAKNALIAGGVDATDANGAELVKMSYTDKNGKTIEGGYALKAGDKYYAADYDEATGAIKAKTTSYTAADGTTKTAANQLGGVDGKTEVVTIDGKTYNASKAAGHDFKAQPELAEAAAKTTENPLQKADAALAQVDALRSDLGAVQNRFNSAITNLGNTVNNLSEARSRIEDSDYATEVSNMSRAQILQQAGTSVLAQANQVPQNVLSLLASLISKEELIKLAYSIRPRENEYKTILTNLDEYNKLTTNNNENKYLQLKKLNESIDVFMNKYKTSSRNRALSNLKKDILKEVILIKNSNTSPVEKNLHFVWIGGEVSDIALEYIKQWADINAEYNIKLWYDSEAFLVNTLKKAIVESSTTEALQLLEEEIQNPQFDNMKFYKKRMEFIYDRQKRFINYYKSQINKPTVPTIDDIIKSHLVSEYNRDETVLESYRTNSLRKINSNHGIDIRANSLFTEQELLNIYSQELLNRGNLAAASAIVALLALKNFGGVALAVAMLPGIHSDLFKTISRPSSIGLDRWEMIKLEAIMKYKKYINNYTSENFDKLDQQLKDNFKLIIESKSEKSEIFSKLENLNVSDLEIKIAFALGSVINQALISKQGSYLTNLVIEQVKNRYQFLNQHLNPAIESDNNFTDTTKIFHDSLFNSATAENSMFLTKIAPYLQVGFMPEARSTISLSGPGAYASAYYDFINLQENTIEKTLKASDLIEFKFPENNLSQLTEQEINSLWSFDQASAKYQFEKYVRDYTGGSLSED

SEQ ID NO: 37 - protein, 949 aa, Artificial Sequence
  Fusion Protein STF2.GTD-A2
MAQVINTNSLSLLTQNNLNKSQSALGTAIERLSSGLRINSAKDDAAGQAIANRFTANIKGLTQASRNANDGISIAQTTEGALNEINNNLQRVRELAVQSANSTNSQSDLDSIQAEITQRLNEIDRVSGQTQFNGVKVLAQDNTLTIQVGANDGETIDIDLKQINSQTLGLDSLNVQKAYDVKDTAVTTKAAVVSADAKNALIAGGVDATDANGAELVKMSYTDKNGKTIEGGYALKAGDKYYAADYDEATGAIKAKTTSYTAADGTTKTAANQLGGVDGKTEVVTIDGKTYNASKAAGHDFKAQPELAEAAAKTTENPLQKADAALAQVDALRSDLGAVQNRFNSAITNLGNTVNNLSEARSRIEDSDYATEVSNMSRAQILQQAGTSVLAQANQVPQNVLSLLASLISKEELIKLAYSIRPRENEYKTILTNLDEYNKLTTNNNENKYLQLKKLNESIDVFMNKYKTSSRNRALSNLKKDILKEVILIKNSNTSPVEKNLHFVWIGGEVSDIALEYIKQWADINAEYNIKLWYDSEAFLVNTLKKAIVESSTTEALQLLEEEIQNPQFDNMKFYKKRMEFIYDRQKRFINYYKSQINKPTVPTIDDIIKSHLVSEYNRDETVLESYRTNSLRKINSNHGIDIRANSLFTEQELLNIYSQELLNRGNLAAASAIVALLALKNFGGVALAVAMLPGIHSDLFKTISRPSSIGLDRWEMIKLEAIMKYKKYINNYTSENFDKLDQQLKDNFKLIIESKSEKSEIFSKLENLNVSDLEIKIAFALGSVINQALISKQGSYLTNLVIEQVKNRYQFLNQHLNPAIESDNNFTDTTKIFHDSLFNSATAENSMFLTKIAPYLQVGFMPEARSTISLSGPGAYASAYYDFINLQENTIEKTLKASDLIEFKFPENNLSQLTEQEINSLWSFDQASAKYQFEKYVRDYTGGSLSED

SEQ ID NO: 38 - protein, 1051 aa, Artificial Sequence
  Fusion Protein STF2.GTD-B2
MAQVINTNSLSLLTQNNLNKSQSALGTAIERLSSGLRINSAKDDAAGQAIANRFTANIKGLTQASRNANDGISIAQTTEGALNEINNNLQRVRELAVQSANSTNSQSDLDSIQAEITQRLNEIDRVSGQTQFNGVKVLAQDNTLTIQVGANDGETIDIDLKQINSQTLGLDSLNVQKAYDVKDTAVTTKAYANNGTTLDVSGLDDAAIKAATGGTNGTASVTGGAVKFDADNNKYFVTIGGFTGADAAKNGDYEVNVATDGTVTLAAGATKTTMPAGATTKTEVQELKDTPAVVSADAKNALIAGGVDATDANGAELVKMSYTDKNGKTIEGGYALKAGDKYYAADYDEATGAIKAKTTSYTAADGTTKTAANQLGGVDGKTEVVTIDGKTYNASKAAGHDFKAQPELAEAAAKTTENPLQKADAALAQVDALRSDLGAVQNRFNSAITNLGNTVNNLSEARSRIEDSDYATEVSNMSRAQILQQAGTSVLAQANQVPQNVLSLLASLVNRKQLEKMANVRFRTQEDEYVAILDALEEYHNMSENTVVEKYLKLKDINSLTDIYIDTYKKSGRNKALKKFKEYLVTEVLELKNNNLTPVEKNLHFVWIGGQINDTAINYINQWKDVNSDYNVNVFYDSNAFLINTLKKTVVESAINDTLESFRENLNDPRFDYNKFFRKRMEIIYDKQKNFINYYKAQREENPELIIDDIVKTYLSNEYSKEIDELNTYIEESLNKITQNSGNDVRNFEEFKNGESFNLYEQELVERWNLAAASAILAISALKEIGGMALAVAMLPGIQPDLFESIEKPSSVTVDFWEMTKLEAIMKYKEYIPEYTSEHFDMLDEEVQSSFESVLASKSDKSEIFSSLGDMEASPLEVKIAFNSKGIINQGLISVKDSYCSNLIVKQIENRYKILNNSLNPAISEDNDFNTTTNTFIDSIMAEANADNGRFMMELGKYLRVGFFPDVKTTINLSGPEAYAAAYQDLLMFKEGSMNIHLIEADLRNFEISKTNISQSTEQEMASLWSFDDARAKAQFEEYKRNYFEGSLGED

SEQ ID NO: 39 - protein, 950 aa, Artificial Sequence
  Fusion Protein STF2.GTD-B2
MAQVINTNSLSLLTQNNLNKSQSALGTAIERLSSGLRINSAKDDAAGQAIANRFTANIKGLTQASRNANDGISIAQTTEGALNEINNNLQRVRELAVQSANSTNSQSDLDSIQAEITQRLNEIDRVSGQTQFNGVKVLAQDNTLTIQVGANDGETIDIDLKQINSQTLGLDSLNVQKAYDVKDTAVTTKAAVVSADAKNALIAGGVDATDANGAELVKMSYTDKNGKTIEGGYALKAGDKYYAADYDEATGAIKAKTTSYTAADGTTKTAANQLGGVDGKTEVVTIDGKTYNASKAAGHDFKAQPELAEAAAKTTENPLQKADAALAQVDALRSDLGAVQNRFNSAITNLGNTVNNLSEARSRIEDSDYATEVSNMSRAQILQQAGTSVLAQANQVPQNVLSLLASLVNRKQLEKMANVRFRTQEDEYVAILDALEEYHNMSENTVVEKYLKLKDINSLTDIYIDTYKKSGRNKALKKFKEYLVTEVLELKNNNLTPVEKNLHFVWIGGQINDTAINYINQWKDVNSDYNVNVFYDSNAFLINTLKKTVVESAINDTLESFRENLNDPRFDYNKFFRKRMEIIYDKQKNFINYYKAQREENPELIIDDIVKTYLSNEYSKEIDELNTYIEESLNKITQNSGNDVRNFEEFKNGESFNLYEQELVERWNLAAASAILAISALKEIGGMALAVAMLPGIQPDLFESIEKPSSVTVDFWEMTKLEAIMKYKEYIPEYTSEHFDMLDEEVQSSFESVLASKSDKSEIFSSLGDMEASPLEVKIAFNSKGIINQGLISVKDSYCSNLIVKQIENRYKILNNSLNPAISEDNDFNTTTNTFIDSIMAEANADNGRFMMELGKYLRVGFFPDVKTTINLSGPEAYAAAYQDLLMFKEGSMNIHLIEADLRNFEISKTNISQSTEQEMASLWSFDDARAKAQFEEYKRNYFEGSLGED

SEQ ID NO: 40 - protein, 772 aa, Artificial Sequence
  Fusion Protein STF2.CPD-A1
MAQVINTNSLSLLTQNNLNKSQSALGTAIERLSSGLRINSAKDDAAGQAIANRFTANIKGLTQASRNANDGISIAQTTEGALNEINNNLQRVRELAVQSANSTNSQSDLDSIQAEITQRLNEIDRVSGQTQFNGVKVLAQDNTLTIQVGANDGETIDIDLKQINSQTLGLDSLNVQKAYDVKDTAVTTKAYANNGTTLDVSGLDDAAIKAATGGTNGTASVTGGAVKFDADNNKYFVTIGGFTGADAAKNGDYEVNVATDGTVTLAAGATKTTMPAGATTKTEVQELKDTPAVVSADAKNALIAGGVDATDANGAELVKMSYTDKNGKTIEGGYALKAGDKYYAADYDEATGAIKAKTTSYTAADGTTKTAANQLGGVDGKTEVVTIDGKTYNASKAAGHDFKAQPELAEAAAKTTENPLQKADAALAQVDALRSDLGAVQNRFNSAITNLGNTVNNLSEARSRIEDSDYATEVSNMSRAQILQQAGTSVLAQANQVPQNVLSLLASEDNGVDFNKNTALDKNYLLNNKIPSNNVEEAGSKNYVHYIIQLQGNDISYEATCNLFSKNPKNSIIIQRNMNESAKSYFLSDDGESILELNKYRIPERLKNKEKVKVTFIGAGKDEFNTSEFARLSVDSLSNEISSFLDTIKLDISPKNVEVNLLGSNMFSYDFNVEETYPGKLLLSIMDKITSTLPDVNKNSITIGANQYEVRINSEGRKELLAHSGKWINKEEAIMSDLSSKEYIFFDSIDNKLKAKSKNIPGLASISEDIKT

SEQ ID NO: 41 - protein, 671 aa, Artificial Sequence
  Fusion Protein STF2.CPD-A1
MAQVINTNSLSLLTQNNLNKSQSALGTAIERLSSGLRINSAKDDAAGQAIANRFTANIKGLTQASRNANDGISIAQTTEGALNEINNNLQRVRELAVQSANSTNSQSDLDSIQAEITQRLNEIDRVSGQTQFNGVKVLAQDNTLTIQVGANDGETIDIDLKQINSQTLGLDSLNVQKAYDVKDTAVTTKAAVVSADAKNALIAGGVDATDANGAELVKMSYTDKNGKTIEGGYALKAGDKYYAADYDEATGAIKAKTTSYTAADGTTKTAANQLGGVDGKTEVVTIDGKTYNASKAAGHDFKAQPELAEAAAKTTENPLQKADAALAQVDALRSDLGAVQNRFNSAITNLGNTVNNLSEARSRIEDSDYATEVSNMSRAQILQQAGTSVLAQANQVPQNVLSLLASEDNGVDFNKNTALDKNYLLNNKIPSNNVEEAGSKNYVHYIIQLQGNDISYEATCNLFSKNPKNSIIIQRNMNESAKSYFLSDDGESILELNKYRIPERLKNKEKVKVTFIGAGKDEFNTSEFARLSVDSLSNEISSFLDTIKLDISPKNVEVNLLGSNMFSYDFNVEETYPGKLLLSIMDKITSTLPDVNKNSITIGANQYEVRINSEGRKELLAHSGKWINKEEAIMSDLSSKEYIFFDSIDNKLKAKSKNIPGLASISEDIKT

SEQ ID NO: 42 - protein, 769 aa, Artificial Sequence
  Fusion Protein STF2.CPD-B1
MAQVINTNSLSLLTQNNLNKSQSALGTAIERLSSGLRINSAKDDAAGQAIANRFTANIKGLTQASRNANDGISIAQTTEGALNEINNNLQRVRELAVQSANSTNSQSDLDSIQAEITQRLNEIDRVSGQTQFNGVKVLAQDNTLTIQVGANDGETIDIDLKQINSQTLGLDSLNVQKAYDVKDTAVTTKAYANNGTTLDVSGLDDAAIKAATGGTNGTASVTGGAVKFDADNNKYFVTIGGFTGADAAKNGDYEVNVATDGTVTLAAGATKTTMPAGATTKTEVQELKDTPAVVSADAKNALIAGGVDATDANGAELVKMSYTDKNGKTIEGGYALKAGDKYYAADYDEATGAIKAKTTSYTAADGTTKTAANQLGGVDGKTEVVTIDGKTYNASKAAGHDFKAQPELAEAAAKTTENPLQKADAALAQVDALRSDLGAVQNRFNSAITNLGNTVNNLSEARSRIEDSDYATEVSNMSRAQILQQAGTSVLAQANQVPQNVLSLLAGEDDNLDFSQNIVVDKEYLLEKISSLARSSERGYIHYIVQLQGNKISYEAACNLFAKTPYDSVLFQKNIEDSEIAYYYNPGDGEIQEIDKYKIPSIISDRPKIKLTFIGAGKDEFNTDIFAGFDVDSLSTEIEAAIDLAKEDISPKSIEINLLGSNMFSYSINVEETYPGKLLLKVKDKISELMPSISQDSIIVSANQYEVRINSEGRRELLDHSGEWINKEESIIKDISSKEYISFNPKENKITVKSKNLPELSTLLQEIRN

SEQ ID NO: 43 - protein, 668 aa, Artificial Sequence
  Fusion Protein STF2.CPD-B1
MAQVINTNSLSLLTQNNLNKSQSALGTAIERLSSGLRINSAKDDAAGQAIANRFTANIKGLTQASRNANDGISIAQTTEGALNEINNNLQRVRELAVQSANSTNSQSDLDSIQAEITQRLNEIDRVSGQTQFNGVKVLAQDNTLTIQVGANDGETIDIDLKQINSQTLGLDSLNVQKAYDVKDTAVTTKAAVVSADAKNALIAGGVDATDANGAELVKMSYTDKNGKTIEGGYALKAGDKYYAADYDEATGAIKAKTTSYTAADGTTKTAANQLGGVDGKTEVVTIDGKTYNASKAAGHDFKAQPELAEAAAKTTENPLQKADAALAQVDALRSDLGAVQNRFNSAITNLGNTVNNLSEARSRIEDSDYATEVSNMSRAQILQQAGTSVLAQANQVPQNVLSLLAGEDDNLDFSQNIVVDKEYLLEKISSLARSSERGYIHYIVQLQGNKISYEAACNLFAKTPYDSVLFQKNIEDSEIAYYYNPGDGEIQEIDKYKIPSIISDRPKIKLTFIGAGKDEFNTDIFAGFDVDSLSTEIEAAIDLAKEDISPKSIEINLLGSNMFSYSINVEETYPGKLLLKVKDKISELMPSISQDSIIVSANQYEVRINSEGRRELLDHSGEWINKEESIIKDISSKEYISFNPKENKITVKSKNLPELSTLLQEIRN

SEQ ID NO: 44 - protein, 772 aa, Artificial Sequence
  Fusion Protein STF2.CPD-A2
MAQVINTNSLSLLTQNNLNKSQSALGTAIERLSSGLRINSAKDDAAGQAIANRFTANIKGLTQASRNANDGISIAQTTEGALNEINNNLQRVRELAVQSANSTNSQSDLDSIQAEITQRLNEIDRVSGQTQFNGVKVLAQDNTLTIQVGANDGETIDIDLKQINSQTLGLDSLNVQKAYDVKDTAVTTKAYANNGTTLDVSGLDDAAIKAATGGTNGTASVTGGAVKFDADNNKYFVTIGGFTGADAAKNGDYEVNVATDGTVTLAAGATKTTMPAGATTKTEVQELKDTPAVVSADAKNALIAGGVDATDANGAELVKMSYTDKNGKTIEGGYALKAGDKYYAADYDEATGAIKAKTTSYTAADGTTKTAANQLGGVDGKTEVVTIDGKTYNASKAAGHDFKAQPELAEAAAKTTENPLQKADAALAQVDALRSDLGAVQNRFNSAITNLGNTVNNLSEARSRIEDSDYATEVSNMSRAQILQQAGTSVLAQANQVPQNVLSLLASEDNGVDFNKNTALDKNYLLNNKIPSNNVEEAGSKNYVHYIIQLQGADISYEATCNLFSKNPKNSIIIQRNMNESAKSYFLSDDGESILELNKYRIPERLKNKEKVKVTFIGAGKDEFNTSEFARLSVDSLSNEISSFLDTIKLDISPKNVEVNLLGANMFSYDFNVEETYPGKLLLSIMDKITSTLPDVNKNSITIGANQYEVRINSEGRKELLAHSGKWINKEEAIMSDLSSKEYIFFDSIDNKLKAKSKNIPGLASISEDIKT

SEQ ID NO: 45 - protein, 671 aa, Artificial Sequence
  Fusion Protein STF2.CPD-A2
MAQVINTNSLSLLTQNNLNKSQSALGTAIERLSSGLRINSAKDDAAGQAIANRFTANIKGLTQASRNANDGISIAQTTEGALNEINNNLQRVRELAVQSANSTNSQSDLDSIQAEITQRLNEIDRVSGQTQFNGVKVLAQDNTLTIQVGANDGETIDIDLKQINSQTLGLDSLNVQKAYDVKDTAVTTKAAVVSADAKNALIAGGVDATDANGAELVKMSYTDKNGKTIEGGYALKAGDKYYAADYDEATGAIKAKTTSYTAADGTTKTAANQLGGVDGKTEVVTIDGKTYNASKAAGHDFKAQPELAEAAAKTTENPLQKADAALAQVDALRSDLGAVQNRFNSAITNLGNTVNNLSEARSRIEDSDYATEVSNMSRAQILQQAGTSVLAQANQVPQNVLSLLASEDNGVDFNKNTALDKNYLLNNKIPSNNVEEAGSKNYVHYIIQLQGADISYEATCNLFSKNPKNSIIIQRNMNESAKSYFLSDDGESILELNKYRIPERLKNKEKVKVTFIGAGKDEFNTSEFARLSVDSLSNEISSFLDTIKLDISPKNVEVNLLGANMFSYDFNVEETYPGKLLLSIMDKITSTLPDVNKNSITIGANQYEVRINSEGRKELLAHSGKWINKEEAIMSDLSSKEYIFFDSIDNKLKAKSKNIPGLASISEDIKT

SEQ ID NO: 46 - protein, 769 aa, Artificial Sequence
  Fusion Protein STF2.CPD-B2
MAQVINTNSLSLLTQNNLNKSQSALGTAIERLSSGLRINSAKDDAAGQAIANRFTANIKGLTQASRNANDGISIAQTTEGALNEINNNLQRVRELAVQSANSTNSQSDLDSIQAEITQRLNEIDRVSGQTQFNGVKVLAQDNTLTIQVGANDGETIDIDLKQINSQTLGLDSLNVQKAYDVKDTAVTTKAYANNGTTLDVSGLDDAAIKAATGGTNGTASVTGGAVKFDADNNKYFVTIGGFTGADAAKNGDYEVNVATDGTVTLAAGATKTTMPAGATTKTEVQELKDTPAVVSADAKNALIAGGVDATDANGAELVKMSYTDKNGKTIEGGYALKAGDKYYAADYDEATGAIKAKTTSYTAADGTTKTAANQLGGVDGKTEVVTIDGKTYNASKAAGHDFKAQPELAEAAAKTTENPLQKADAALAQVDALRSDLGAVQNRFNSAITNLGNTVNNLSEARSRIEDSDYATEVSNMSRAQILQQAGTSVLAQANQVPQNVLSLLAGEDDNLDFSQNIVVDKEYLLEKISSLARSSERGYIHYIVQLQGAKISYEAACNLFAKTPYDSVLFQKNIEDSEIAYYYNPGDGEIQEIDKYKIPSIISDRPKIKLTFIGAGKDEFNTDIFAGFDVDSLSTEIEAAIDLAKEDISPKSIEINLLGANMFSYSINVEETYPGKLLLKVKDKISELMPSISQDSIIVSANQYEVRINSEGRRELLDHSGEWINKEESIIKDISSKEYISFNPKENKITVKSKNLPELSTLLQEIRN

SEQ ID NO: 47 - protein, 668 aa, Artificial Sequence
  Fusion Protein STF2.CPD-B2
MAQVINTNSLSLLTQNNLNKSQSALGTAIERLSSGLRINSAKDDAAGQAIANRFTANIKGLTQASRNANDGISIAQTTEGALNEINNNLQRVRELAVQSANSTNSQSDLDSIQAEITQRLNEIDRVSGQTQFNGVKVLAQDNTLTIQVGANDGETIDIDLKQINSQTLGLDSLNVQKAYDVKDTAVTTKAAVVSADAKNALIAGGVDATDANGAELVKMSYTDKNGKTIEGGYALKAGDKYYAADYDEATGAIKAKTTSYTAADGTTKTAANQLGGVDGKTEVVTIDGKTYNASKAAGHDFKAQPELAEAAAKTTENPLQKADAALAQVDALRSDLGAVQNRFNSAITNLGNTVNNLSEARSRIEDSDYATEVSNMSRAQILQQAGTSVLAQANQVPQNVLSLLAGEDDNLDFSQNIVVDKEYLLEKISSLARSSERGYIHYIVQLQGAKISYEAACNLFAKTPYDSVLFQKNIEDSEIAYYYNPGDGEIQEIDKYKIPSIISDRPKIKLTFIGAGKDEFNTDIFAGFDVDSLSTEIEAAIDLAKEDISPKSIEINLLGANMFSYSINVEETYPGKLLLKVKDKISELMPSISQDSIIVSANQYEVRINSEGRRELLDHSGEWINKEESIIKDISSKEYISFNPKENKITVKSKNLPELSTLLQEIRN

SEQ ID NO: 48 - protein, 1405 aa, Artificial Sequence
  Fusion Protein STF2.RBD-A2
MAQVINTNSLSLLTQNNLNKSQSALGTAIERLSSGLRINSAKDDAAGQAIANRFTANIKGLTQASRNANDGISIAQTTEGALNEINNNLQRVRELAVQSANSTNSQSDLDSIQAEITQRLNEIDRVSGQTQFNGVKVLAQDNTLTIQVGANDGETIDIDLKQINSQTLGLDSLNVQKAYDVKDTAVTTKAYANNGTTLDVSGLDDAAIKAATGGTNGTASVTGGAVKFDADNNKYFVTIGGFTGADAAKNGDYEVNVATDGTVTLAAGATKTTMPAGATTKTEVQELKDTPAVVSADAKNALIAGGVDATDANGAELVKMSYTDKNGKTIEGGYALKAGDKYYAADYDEATGAIKAKTTSYTAADGTTKTAANQLGGVDGKTEVVTIDGKTYNASKAAGHDFKAQPELAEAAAKTTENPLQKADAALAQVDALRSDLGAVQNRFNSAITNLGNTVNNLSEARSRIEDSDYATEVSNMSRAQILQQAGTSVLAQANQVPQNVLSLLAGFKIIDNKTYYYDEDSKLVKGLININNSLFYFDPIEFNLVTGWQTINGKKYYFDINTGAALTSYKIINGKHFYFNNDGVMQLGVFKGPDGFEYFAPANTQNNNIEGQAIVYQSKFLTLNGKKYYFDNNSKAVTGWRIINNEKYYFNPNNAIAAVGLQVIDNNKYYFNPDTAIISKGWQTVNGSRYYFDTDTAIAFNGYKTIDGKHFYFDSDCVVKIGVFSTSNGFEYFAPANTYNNNIEGQAIVYQSKFLTLNGKKYYFDNNSKAVTGWQTIDSKKYYFNTNTAEAATGWQTIDGKKYYFNTNTAEAATGWQTIDGKKYYFNTNTAIASTGYTIINGKHFYFNTDGIMQIGVFKGPNGFEYFAPANTDANNIEGQAILYQNEFLTLNGKKYYFGSDSKAVTGWRIINNKKYYFNPNNAIAAIHLCTINNDKYYFSYDGILQNGYITIERNNFYFDANNESKMVTGVFKGPNGFEYFAPANTHNNNIEGQAIVYQNKFLTLNGKKYYFDNDSKAVTGWQTIDGKKYYFNLNTAEAATGWQTIDGKKYYFNLNTAEAATGWQTIDGKKYYFNTNTFIASTGYTSINGKHFYFNTDGIMQIGVFKGPNGFEYFAPANTDANNIEGQAILYQNKFLTLNGKKYYFGSDSKAVTGLRTIDGKKYYFNTNTAVAVTGWQTINGKKYYFNTNTSIASTGYTIISGKHFYFNTDGIMQIGVFKGPDGFEYFAPANTDANNIEGQAIRYQNRFLYLHDNIYYFGNNSKAATGWVTIDGNRYYFEPNTAMGANGYKTIDNKNFYFRNGLPQIGVFKGSNGFEYFAPANTDANNIEGQAIRYQNRFLHLLGKIYYFGNNSKAVTGWQTINGKVYYFMPDTAMAAAGGLFEIDGVIYFFGVDGVKAPGIYG

SEQ ID NO: 49 - protein, 1304 aa, Artificial Sequence
  Fusion Protein STF2.RBD-A2
MAQVINTNSLSLLTQNNLNKSQSALGTAIERLSSGLRINSAKDDAAGQAIANRFTANIKGLTQASRNANDGISIAQTTEGALNEINNNLQRVRELAVQSANSTNSQSDLDSIQAEITQRLNEIDRVSGQTQFNGVKVLAQDNTLTIQVGANDGETIDIDLKQINSQTLGLDSLNVQKAYDVKDTAVTTKAAVVSADAKNALIAGGVDATDANGAELVKMSYTDKNGKTIEGGYALKAGDKYYAADYDEATGAIKAKTTSYTAADGTTKTAANQLGGVDGKTEVVTIDGKTYNASKAAGHDFKAQPELAEAAAKTTENPLQKADAALAQVDALRSDLGAVQNRFNSAITNLGNTVNNLSEARSRIEDSDYATEVSNMSRAQILQQAGTSVLAQANQVPQNVLSLLAGFKIIDNKTYYYDEDSKLVKGLININNSLFYFDPIEFNLVTGWQTINGKKYYFDINTGAALTSYKIINGKHFYFNNDGVMQLGVFKGPDGFEYFAPANTQNNNIEGQAIVYQSKFLTLNGKKYYFDNNSKAVTGWRIINNEKYYFNPNNAIAAVGLQVIDNNKYYFNPDTAIISKGWQTVNGSRYYFDTDTAIAFNGYKTIDGKHFYFDSDCVVKIGVFSTSNGFEYFAPANTYNNNIEGQAIVYQSKFLTLNGKKYYFDNNSKAVTGWQTIDSKKYYFNTNTAEAATGWQTIDGKKYYFNTNTAEAATGWQTIDGKKYYFNTNTAIASTGYTIINGKHFYFNTDGIMQIGVFKGPNGFEYFAPANTDANNIEGQAILYQNEFLTLNGKKYYFGSDSKAVTGWRIINNKKYYFNPNNAIAAIHLCTINNDKYYFSYDGILQNGYITIERNNFYFDANNESKMVTGVFKGPNGFEYFAPANTHNNNIEGQAIVYQNKFLTLNGKKYYFDNDSKAVTGWQTIDGKKYYFNLNTAEAATGWQTIDGKKYYFNLNTAEAATGWQTIDGKKYYFNTNTFIASTGYTSINGKHFYFNTDGIMQIGVFKGPNGFEYFAPANTDANNIEGQAILYQNKFLTLNGKKYYFGSDSKAVTGLRTIDGKKYYFNTNTAVAVTGWQTINGKKYYFNTNTSIASTGYTIISGKHFYFNTDGIMQIGVFKGPDGFEYFAPANTDANNIEGQAIRYQNRFLYLHDNIYYFGNNSKAATGWVTIDGNRYYFEPNTAMGANGYKTIDNKNFYFRNGLPQIGVFKGSNGFEYFAPANTDANNIEGQAIRYQNRFLHLLGKIYYFGNNSKAVTGWQTINGKVYYFMPDTAMAAAGGLFEIDGVIYFFGVDGVKAPGIYG

SEQ ID NO: 50 - protein, 1059 aa, Artificial Sequence
  Fusion Protein STF2.RBD-B2
MAQVINTNSLSLLTQNNLNKSQSALGTAIERLSSGLRINSAKDDAAGQAIANRFTANIKGLTQASRNANDGISIAQTTEGALNEINNNLQRVRELAVQSANSTNSQSDLDSIQAEITQRLNEIDRVSGQTQFNGVKVLAQDNTLTIQVGANDGETIDIDLKQINSQTLGLDSLNVQKAYDVKDTAVTTKAYANNGTTLDVSGLDDAAIKAATGGTNGTASVTGGAVKFDADNNKYFVTIGGFTGADAAKNGDYEVNVATDGTVTLAAGATKTTMPAGATTKTEVQELKDTPAVVSADAKNALIAGGVDATDANGAELVKMSYTDKNGKTIEGGYALKAGDKYYAADYDEATGAIKAKTTSYTAADGTTKTAANQLGGVDGKTEVVTIDGKTYNASKAAGHDFKAQPELAEAAAKTTENPLQKADAALAQVDALRSDLGAVQNRFNSAITNLGNTVNNLSEARSRIEDSDYATEVSNMSRAQILQQAGTSVLAQANQVPQNVLSLLAGLVSLYNEKFYINNFGMMVSGLIYINDSLYYFKPPVNNLITGFVTVGDDKYYFNPINGGAASIGETIIDDKNYYFNQSGVLQTGVFSTEDGFKYFAPANTLDENLEGEAIDFTGKLIIDENIYYFDDNYRGAVEWKELDGEMHYFSPETGKAFKGLNQIGDYKYYFNSDGVMQKGFVSINDNKHYFDDSGVMKVGYTEIDGKHFYFAENGEMQIGVFNTEDGFKYFAHHNEDLGNEEGEEISYSGILNFNNKIYYFDDSFTAVVGWKDLEDGSKYYFDEDTAEAYIGLSLINDGQYYFNDDGIMQVGFVTINDKVFYFSDSGIIESGVQNIDDNYFYIDDNGIVQIGVFDTSDGYKYFAPANTVNDNIYGQAVEYSGLVRVGEDVYYFGETYTIETGWIYDMENESDKYYFNPETKKACKGINLIDDIKYYFDEKGIMRTGLISFENNNYYFNENGEMQFGYINIEDKMFYFGEDGVMQIGVFNTPDGFKYFAHQNTLDENFEGESINYTGWLDLDEKRYYFTDEYIAATGSVIIDGEEYYFDPDTAQLVISE

SEQ ID NO: 51 - protein, 958 aa, Artificial Sequence
  Fusion Protein STF2.RBD-B2
MAQVINTNSLSLLTQNNLNKSQSALGTAIERLSSGLRINSAKDDAAGQAIANRFTANIKGLTQASRNANDGISIAQTTEGALNEINNNLQRVRELAVQSANSTNSQSDLDSIQAEITQRLNEIDRVSGQTQFNGVKVLAQDNTLTIQVGANDGETIDIDLKQINSQTLGLDSLNVQKAYDVKDTAVTTKAAVVSADAKNALIAGGVDATDANGAELVKMSYTDKNGKTIEGGYALKAGDKYYAADYDEATGAIKAKTTSYTAADGTTKTAANQLGGVDGKTEVVTIDGKTYNASKAAGHDFKAQPELAEAAAKTTENPLQKADAALAQVDALRSDLGAVQNRFNSAITNLGNTVNNLSEARSRIEDSDYATEVSNMSRAQILQQAGTSVLAQANQVPQNVLSLLAGLVSLYNEKFYINNFGMMVSGLIYINDSLYYFKPPVNNLITGFVTVGDDKYYFNPINGGAASIGETIIDDKNYYFNQSGVLQTGVFSTEDGFKYFAPANTLDENLEGEAIDFTGKLIIDENIYYFDDNYRGAVEWKELDGEMHYFSPETGKAFKGLNQIGDYKYYFNSDGVMQKGFVSINDNKHYFDDSGVMKVGYTEIDGKHFYFAENGEMQIGVFNTEDGFKYFAHHNEDLGNEEGEEISYSGILNFNNKIYYFDDSFTAVVGWKDLEDGSKYYFDEDTAEAYIGLSLINDGQYYFNDDGIMQVGFVTINDKVFYFSDSGIIESGVQNIDDNYFYIDDNGIVQIGVFDTSDGYKYFAPANTVNDNIYGQAVEYSGLVRVGEDVYYFGETYTIETGWIYDMENESDKYYFNPETKKACKGINLIDDIKYYFDEKGIMRTGLISFENNNYYFNENGEMQFGYINIEDKMFYFGEDGVMQIGVFNTPDGFKYFAHQNTLDENFEGESINYTGWLDLDEKRYYFTDEYIAATGSVIIDGEEYYFDPDTAQLVISE

SEQ ID NO: 52 - protein, 1167 aa, Artificial Sequence
  Fusion Protein STF2DELTA.RBD-A2
MAQVINTNSLSLLTQNNLNKSQSALGTAIERLSSGLRINSAKDDAAGQAIANRFTANIKGLTQASRNANDGISIAQTTEGALNEINNNLQRVRELAVQSANSTNSQSDLDSIQAEITQRLNEIDRVSGQTQFNGVKVLAQDNTLTIQVGANDGETIDIDLKQINSQTLGLDSLNVQTTENPLQKADAALAQVDALRSDLGAVQNRFNSAITNLGNTVNNLSEARSRIEDSDYATEVSNMSRAQILQQAGTSVLAQANQVPQNVLSLLAGFKIIDNKTYYYDEDSKLVKGLININNSLFYFDPIEFNLVTGWQTINGKKYYFDINTGAALTSYKIINGKHFYFNNDGVMQLGVFKGPDGFEYFAPANTQNNNIEGQAIVYQSKFLTLNGKKYYFDNNSKAVTGWRIINNEKYYFNPNNAIAAVGLQVIDNNKYYFNPDTAIISKGWQTVNGSRYYFDTDTAIAFNGYKTIDGKHFYFDSDCVVKIGVFSTSNGFEYFAPANTYNNNIEGQAIVYQSKFLTLNGKKYYFDNNSKAVTGWQTIDSKKYYFNTNTAEAATGWQTIDGKKYYFNTNTAEAATGWQTIDGKKYYFNTNTAIASTGYTIINGKHFYFNTDGIMQIGVFKGPNGFEYFAPANTDANNIEGQAILYQNEFLTLNGKKYYFGSDSKAVTGWRIINNKKYYFNPNNAIAAIHLCTINNDKYYFSYDGILQNGYITIERNNFYFDANNESKMVTGVFKGPNGFEYFAPANTHNNNIEGQAIVYQNKFLTLNGKKYYFDNDSKAVTGWQTIDGKKYYFNLNTAEAATGWQTIDGKKYYFNLNTAEAATGWQTIDGKKYYFNTNTFIASTGYTSINGKHFYFNTDGIMQIGVFKGPNGFEYFAPANTDANNIEGQAILYQNKFLTLNGKKYYFGSDSKAVTGLRTIDGKKYYFNTNTAVAVTGWQTINGKKYYFNTNTSIASTGYTIISGKHFYFNTDGIMQIGVFKGPDGFEYFAPANTDANNIEGQAIRYQNRFLYLHDNIYYFGNNSKAATGWVTIDGNRYYFEPNTAMGANGYKTIDNKNFYFRNGLPQIGVFKGSNGFEYFAPANTDANNIEGQAIRYQNRFLHLLGKIYYFGNNSKAVTGWQTINGKVYYFMPDTAMAAAGGLFEIDGVIYFFGVDGVKAPGIYG

SEQ ID NO: 53 - protein, 821 aa, Artificial Sequence
  Fusion Protein STF2DELTA.RBD-B2
MAQVINTNSLSLLTQNNLNKSQSALGTAIERLSSGLRINSAKDDAAGQAIANRFTANIKGLTQASRNANDGISIAQTTEGALNEINNNLQRVRELAVQSANSTNSQSDLDSIQAEITQRLNEIDRVSGQTQFNGVKVLAQDNTLTIQVGANDGETIDIDLKQINSQTLGLDSLNVQTTENPLQKADAALAQVDALRSDLGAVQNRFNSAITNLGNTVNNLSEARSRIEDSDYATEVSNMSRAQILQQAGTSVLAQANQVPQNVLSLLAGLVSLYNEKFYINNFGMMVSGLIYINDSLYYFKPPVNNLITGFVTVGDDKYYFNPINGGAASIGETIIDDKNYYFNQSGVLQTGVFSTEDGFKYFAPANTLDENLEGEAIDFTGKLIIDENIYYFDDNYRGAVEWKELDGEMHYFSPETGKAFKGLNQIGDYKYYFNSDGVMQKGFVSINDNKHYFDDSGVMKVGYTEIDGKHFYFAENGEMQIGVFNTEDGFKYFAHHNEDLGNEEGEEISYSGILNFNNKIYYFDDSFTAVVGWKDLEDGSKYYFDEDTAEAYIGLSLINDGQYYFNDDGIMQVGFVTINDKVFYFSDSGIIESGVQNIDDNYFYIDDNGIVQIGVFDTSDGYKYFAPANTVNDNIYGQAVEYSGLVRVGEDVYYFGETYTIETGWIYDMENESDKYYFNPETKKACKGINLIDDIKYYFDEKGIMRTGLISFENNNYYFNENGEMQFGYINIEDKMFYFGEDGVMQIGVFNTPDGFKYFAHQNTLDENFEGESINYTGWLDLDEKRYYFTDEYIAATGSVIIDGEEYYFDPDTAQLVISE

SEQ ID NO: 54 - protein, 506 aa, Artificial Sequence
  Flagellin (FljB) from Salmonella typhimurium with R506A STF2
MAQVINTNSLSLLTQNNLNKSQSALGTAIERLSSGLRINSAKDDAAGQAIANRFTANIKGLTQASRNANDGISIAQTTEGALNEINNNLQRVRELAVQSANSTNSQSDLDSIQAEITQRLNEIDRVSGQTQFNGVKVLAQDNTLTIQVGANDGETIDIDLKQINSQTLGLDSLNVQKAYDVKDTAVTTKAYANNGTTLDVSGLDDAAIKAATGGTNGTASVTGGAVKFDADNNKYFVTIGGFTGADAAKNGDYEVNVATDGTVTLAAGATKTTMPAGATTKTEVQELKDTPAVVSADAKNALIAGGVDATDANGAELVKMSYTDKNGKTIEGGYALKAGDKYYAADYDEATGAIKAKTTSYTAADGTTKTAANQLGGVDGKTEVVTIDGKTYNASKAAGHDFKAQPELAEAAAKTTENPLQKIDAALAQVDALRSDLGAVQNRFNSAITNLGNTVNNLSEARSRIEDSDYATEVSNMSRAQILQQAGTSVLAQANQVPQNVLSLLA

SEQ ID NO: 55 - protein, 405 aa, Artificial Sequence
  Flagellin R3 with R405A STF2
MAQVINTNSLSLLTQNNLNKSQSALGTAIERLSSGLRINSAKDDAAGQAIANRFTANIKGLTQASRNANDGISIAQTTEGALNEINNNLQRVRELAVQSANSTNSQSDLDSIQAEITQRLNEIDRVSGQTQFNGVKVLAQDNTLTIQVGANDGETIDIDLKQINSQTLGLDSLNVQKAYDVKDTAVTTKAAVVSADAKNALIAGGVDATDANGAELVKMSYTDKNGKTIEGGYALKAGDKYYAADYDEATGAIKAKTTSYTAADGTTKTAANQLGGVDGKTEVVTIDGKTYNASKAAGHDFKAQPELAEAAAKTTENPLQKIDAALAQVDALRSDLGAVQNRFNSAITNLGNTVNNLSEARSRIEDSDYATEVSNMSRAQILQQAGTSVLAQANQVPQNVLSLLA

SEQ ID NO: 56 - protein, 545 aa, Artificial Sequence
  C. difficile, TcdA N-terminal GTD or GTD-A residues 1-545
MSLISKEELIKLAYSIRPRENEYKTILTNLDEYNKLTTNNNENKYLQLKKLNESIDVFMNKYKTSSRNRALSNLKKDILKEVILIKNSNTSPVEKNLHFVWIGGEVSDIALEYIKQWADINAEYNIKLWYDSEAFLVNTLKKAIVESSTTEALQLLEEEIQNPQFDNMKFYKKRMEFIYDRQKRFINYYKSQINKPTVPTIDDIIKSHLVSEYNRDETVLESYRTNSLRKINSNHGIDIRANSLFTEQELLNIYSQELLNRGNLAAASDIVRLLALKNFGGVYLDVDMLPGIHSDLFKTISRPSSIGLDRWEMIKLEAIMKYKKYINNYTSENFDKLDQQLKDNFKLIIESKSEKSEIFSKLENLNVSDLEIKIAFALGSVINQALISKQGSYLTNLVIEQVKNRYQFLNQHLNPAIESDNNFTDTTKIFHDSLFNSATAENSMFLTKIAPYLQVGFMPEARSTISLSGPGAYASAYYDFINLQENTIEKTLKASDLIEFKFPENNLSQLTEQEINSLWSFDQASAKYQFEKYVRDYTGGSLSED

SEQ ID NO: 57 - protein, 544 aa, Artificial Sequence
  C. difficile, TcdA, GTD-A1
SLISKEELIKLAYSIRPRENEYKTILTNLDEYNKLTTNNNENKYLQLKKLNESIDVFMNKYKTSSRNRALSNLKKDILKEVILIKNSNTSPVEKNLHFVWIGGEVSDIALEYIKQWADINAEYNIKLWYDSEAFLVNTLKKAIVESSTTEALQLLEEEIQNPQFDNMKFYKKRMEFIYDRQKRFINYYKSQINKPTVPTIDDIIKSHLVSEYNRDETVLESYRTNSLRKINSNHGIDIRANSLFTEQELLNIYSQELLNRGNLAAASNIVRLLALKNFGGVYLNVDMLPGIHSDLFKTISRPSSIGLDRWEMIKLEAIMKYKKYINNYTSENFDKLDQQLKDNFKLIIESKSEKSEIFSKLENLNVSDLEIKIAFALGSVINQALISKQGSYLTNLVIEQVKNRYQFLNQHLNPAIESDNNFTDTTKIFHDSLFNSATAENSMFLTKIAPYLQVGFMPEARSTISLSGPGAYASAYYDFINLQENTIEKTLKASDLIEFKFPENNLSQLTEQEINSLWSFDQASAKYQFEKYVRDYTGGSLSED

SEQ ID NO: 58 - protein, 264 aa, Artificial Sequence
  C. difficile, CPD-A
NGVDFNKNTALDKNYLLNNKIPSNNVEEAGSKNYVHYIIQLQGDDISYEATCNLFSKNPKNSIIIQRNMNESAKSYFLSDDGESILELNKYRIPERLKNKEKVKVTFIGHGKDEFVNTSEFARLSVDSLSNEISSFLDTIKLDISPKNVEVNLLGCNMFSYDFNVEETYPGKLLLSIMDKITSTLPDVNKNSITIGANQYEVRINSEGRKELLAHSGKWINKEEAIMSDLSSKEYIFFDSIDNKLKAKSKNIPGLASISEDIKT

SEQ ID NO: 59 - protein, 266 aa, Artificial Sequence
  C. difficile, TcdA CPD-A1
SEDNGVDFNKNTALDKNYLLNNKIPSNNVEEAGSKNYVHYIIQLQGNDISYEATCNLFSKNPKNSIIIQRNMNESAKSYFLSDDGESILELNKYRIPERLKNKEKVKVTFIGAGKDEFNTSEFARLSVDSLSNEISSFLDTIKLDISPKNVEVNLLGSNMFSYDFNVEETYPGKLLLSIMDKITSTLPDVNKNSITIGANQYEVRINSEGRKELLAHSGKWINKEEAIMSDLSSKEYIFFDSIDNKLKAKSKNIPGLASISEDIKT

SEQ ID NO: 60 - protein, 899 aa, Artificial Sequence
  C. difficile, TcdA, RBD-A2
GFKIIDNKTYYYDEDSKLVKGLININNSLFYFDPIEFNLVTGWQTINGKKYYFDINTGAALTSYKIINGKHFYFNNDGVMQLGVFKGPDGFEYFAPANTQNNNIEGQAIVYQSKFLTLNGKKYYFDNNSKAVTGWRIINNEKYYFNPNNAIAAVGLQVIDNNKYYFNPDTAIISKGWQTVNGSRYYFDTDTAIAFNGYKTIDGKHFYFDSDCVVKIGVFSTSNGFEYFAPANTYNNNIEGQAIVYQSKFLTLNGKKYYFDNNSKAVTGWQTIDSKKYYFNTNTAEAATGWQTIDGKKYYFNTNTAEAATGWQTIDGKKYYFNTNTAIASTGYTIINGKHFYFNTDGIMQIGVFKGPNGFEYFAPANTDANNIEGQAILYQNEFLTLNGKKYYFGSDSKAVTGWRIINNKKYYFNPNNAIAAIHLCTINNDKYYFSYDGILQNGYITIERNNFYFDANNESKMVTGVFKGPNGFEYFAPANTHNNNIEGQAIVYQNKFLTLNGKKYYFDNDSKAVTGWQTIDGKKYYFNLNTAEAATGWQTIDGKKYYFNLNTAEAATGWQTIDGKKYYFNTNTFIASTGYTSINGKHFYFNTDGIMQIGVFKGPNGFEYFAPANTDANNIEGQAILYQNKFLTLNGKKYYFGSDSKAVTGLRTIDGKKYYFNTNTAVAVTGWQTINGKKYYFNTNTSIASTGYTIISGKHFYFNTDGIMQIGVFKGPDGFEYFAPANTDANNIEGQAIRYQNRFLYLHDNIYYFGNNSKAATGWVTIDGNRYYFEPNTAMGANGYKTIDNKNFYFRNGLPQIGVFKGSNGFEYFAPANTDANNIEGQAIRYQNRFLHLLGKIYYFGNNSKAVTGWQTINGKVYYFMPDTAMAAAGGLFEIDGVIYFFGVDGVKAPGIYG

SEQ ID NO: 61 - protein, 321 aa, Artificial Sequence
  C. difficile, TcdA, RBD-A1
ASTGYTSINGKHFYFNTDGIMQIGVFKGPNGFEYFAPANTDANNIEGQAILYQNKFLTLNGKKYYFGSDSKAVTGLRTIDGKKYYFNTNTAVAVTGWQTINGKKYYFNTNTSIASTGYTIISGKHFYFNTDGIMQIGVFKGPDGFEYFAPANTDANNIEGQAIRYQNRFLYLHDNIYYFGNNSKAATGWVTIDGNRYYFEPNTAMGANGYKTIDNKNFYFRNGLPQIGVFKGSNGFEYFAPANTDANNIEGQAIRYQNRFLHLLGKIYYFGNNSKAVTGWQTINGKVYYFMPDTAMAAAGGLFEIDGVIYFFGVDGVKAPG

SEQ ID NO: 62 - protein, 139 aa, Artificial Sequence
  C. difficile, TcdA, RBD-f1
GGGGGNRYYFEPNTAMGANGYKTIDNKNFYFRNGLPQIGVFKGSNGFEYFAPANTDANNIEGQAIRYQNRFLHLLGKIYYFGNNSKAVTGWQTINGKVYYFMPDTAMAAAGGLFEIDGVIYFFGVDGVKAPGIYGGGGG

SEQ ID NO: 63 - protein, 546 aa, Artificial Sequence
  C. difficile, TcdB, GTD-B residues 1-546
MSLVNRKQLEKMANVRFRTQEDEYVAILDALEEYHNMSENTVVEKYLKLKDINSLTDIYIDTYKKSGRNKALKKFKEYLVTEVLELKNNNLTPVEKNLHFVWIGGQINDTAINYINQWKDVNSDYNVNVFYDSNAFLINTLKKTVVESAINDTLESFRENLNDPRFDYNKFFRKRMEIIYDKQKNFINYYKAQREENPELIIDDIVKTYLSNEYSKEIDELNTYIEESLNKITQNSGNDVRNFEEFKNGESFNLYEQELVERWNLAAASDILRISALKEIGGMYLDVDMLPGIQPDLFESIEKPSSVTVDFWEMTKLEAIMKYKEYIPEYTSEHFDMLDEEVQSSFESVLASKSDKSEIFSSLGDMEASPLEVKIAFNSKGIINQGLISVKDSYCSNLIVKQIENRYKILNNSLNPAISEDNDFNTTTNTFIDSIMAEANADNGRFMMELGKYLRVGFFPDVKTTINLSGPEAYAAAYQDLLMFKEGSMNIHLIEADLRNFEISKTNISQSTEQEMASLWSFDDARAKAQFEEYKRNYFEGSLGED

SEQ ID NO: 64 - protein, 545 aa, Artificial Sequence
  C. difficile, TcdB, GTD-B1
SLVNRKQLEKMANVRFRTQEDEYVAILDALEEYHNMSENTVVEKYLKLKDINSLTDIYIDTYKKSGRNKALKKFKEYLVTEVLELKNNNLTPVEKNLHFVWIGGQINDTAINYINQWKDVNSDYNVNVFYDSNAFLINTLKKTVVESAINDTLESFRENLNDPRFDYNKFFRKRMEIIYDKQKNFINYYKAQREENPELIIDDIVKTYLSNEYSKEIDELNTYIEESLNKITQNSGNDVRNFEEFKNGESFNLYEQELVERWNLAAASNILRISALKEIGGMYLNVDMLPGIQPDLFESIEKPSSVTVDFWEMTKLEAIMKYKEYIPEYTSEHFDMLDEEVQSSFESVLASKSDKSEIFSSLGDMEASPLEVKIAFNSKGIINQGLISVKDSYCSNLIVKQIENRYKILNNSLNPAISEDNDFNTTTNTFIDSIMAEANADNGRFMMELGKYLRVGFFPDVKTTINLSGPEAYAAAYQDLLMFKEGSMNIHLIEADLRNFEISKTNISQSTEQEMASLWSFDDARAKAQFEEYKRNYFEGSLGED

SEQ ID NO: 65 - protein, 260 aa, Artificial Sequence
  C. difficile, TcdB, CPD-B
DNLDFSQNIVVDKEYLLEKISSLARSSERGYIHYIVQLQGDKISYEAACNLFAKTPYDSVLFQKNIEDSEIAYYYNPGDGEIQEIDKYKIPSIISDRPKIKLTFIGHGKDEFNTDIFAGFDVDSLSTEIEAAIDLAKEDISPKSIEINLLGCNMFSYSINVEETYPGKLLLKVKDKISELMPSISQDSIIVSANQYEVRINSEGRRELLDHSGEWINKEESIIKDISSKEYISFNPKENKITVKSKNLPELSTLLQEIRN

SEQ ID NO: 66 - protein, 263 aa, Artificial Sequence
  C. difficile, TcdB CPD-B1
GEDDNLDFSQNIVVDKEYLLEKISSLARSSERGYIHYIVQLQGNKISYEAACNLFAKTPYDSVLFQKNIEDSEIAYYYNPGDGEIQEIDKYKIPSIISDRPKIKLTFIGAGKDEFNTDIFAGFDVDSLSTEIEAAIDLAKEDISPKSIEINLLGSNMFSYSINVEETYPGKLLLKVKDKISELMPSISQDSIIVSANQYEVRINSEGRRELLDHSGEWINKEESIIKDISSKEYISFNPKENKITVKSKNLPELSTLLQEIRN

SEQ ID NO: 67 - protein, 553 aa, Artificial Sequence
  C. difficile, TcdB, RBD-B2
GLVSLYNEKFYINNFGMMVSGLIYINDSLYYFKPPVNNLITGFVTVGDDKYYFNPINGGAASIGETIIDDKNYYFNQSGVLQTGVFSTEDGFKYFAPANTLDENLEGEAIDFTGKLIIDENIYYFDDNYRGAVEWKELDGEMHYFSPETGKAFKGLNQIGDYKYYFNSDGVMQKGFVSINDNKHYFDDSGVMKVGYTEIDGKHFYFAENGEMQIGVFNTEDGFKYFAHHNEDLGNEEGEEISYSGILNFNNKIYYFDDSFTAVVGWKDLEDGSKYYFDEDTAEAYIGLSLINDGQYYFNDDGIMQVGFVTINDKVFYFSDSGIIESGVQNIDDNYFYIDDNGIVQIGVFDTSDGYKYFAPANTVNDNIYGQAVEYSGLVRVGEDVYYFGETYTIETGWIYDMENESDKYYFNPETKKACKGINLIDDIKYYFDEKGIMRTGLISFENNNYYFNENGEMQFGYINIEDKMFYFGEDGVMQIGVFNTPDGFKYFAHQNTLDENFEGESINYTGWLDLDEKRYYFTDEYIAATGSVIIDGEEYYFDPDTAQLVISE

SEQ ID NO: 68 - protein, 362 aa, Artificial Sequence
  C. difficile, TcdB, RBD-B1
MKVGYTEIDGKHFYFAENGEMQIGVFNTEDGFKYFAHHNEDLGNEEGEEISYSGILNFNNKIYYFDDSFTAVVGWKDLEDGSKYYFDEDTAEAYIGLSLINDGQYYFNDDGIMQVGFVTINDKVFYFSDSGIIESGVQNIDDNYFYIDDNGIVQIGVFDTSDGYKYFAPANTVNDNIYGQAVEYSGLVRVGEDVYYFGETYTIETGWIYDMENESDKYYFNPETKKACKGINLIDDIKYYFDEKGIMRTGLISFENNNYYFNENGEMQFGYINIEDKMFYFGEDGVMQIGVFNTPDGFKYFAHQNTLDENFEGESINYTGWLDLDEKRYYFTDEYIAATGSVIIDGEEYYFDPDTAQLVISE

SEQ ID NO: 69 - protein, 155 aa, Artificial Sequence
  C. difficile, TcdB, RBD-f1
GGGGGKYYFNPETKKACKGINLIDDIKYYFDEKGIMRTGLISFENNNYYFNENGEMQFGYINIEDKMFYFGEDGVMQIGVFNTPDGFKYFAHQNTLDENFEGESINYTGWLDLDEKRYYFTDEYIAATGSVIIDGEEYYFDPDTAQLVISEGGGG

SEQ ID NO: 70 - protein, 20 aa, Artificial Sequence
  Short repeat fragment of RBD
GFKIIDNKTYYYDEDSKLVK

SEQ ID NO: 71 - protein, 21 aa, Artificial Sequence
  Short repeat fragment of RBD
GLININNSLFYFDPIEFNLVT

SEQ ID NO: 72 - protein, 21 aa, Artificial Sequence
  Short repeat fragment of RBD
GWQTINGKKYYFDINTGAALT

SEQ ID NO: 73 - protein, 463 aa, Artificial Sequence
  Clostridium difficile binary toxins cdtA
MKKFRKHKRISNCISILLILYLTLGGLLPNNIYAQDLQSYSEKVCNTTYKAPIERPEDFLKDKEKAKEWERKEAERIEQKLERSEKEALESYKKDSVEISKYSQTRNYFYDYQIEANSREKEYKELRNAISKNKIDKPMYVYYFESPEKFAFNKVIRTENQNEISLEKFNEFKETIQNKLFKQDGFKDISLYEPGKGDEKPTPLLMHLKLPRNTGMLPYTNTNNVSTLIEQGYSIKIDKIVRIVIDGKHYIKAEASVVSSLDFKDDVSKGDSWGKANYNDWSNKLTPNELADVNDYMRGGYTAINNYLISNGPVVNPNPELDSKITNIENALKREPIPTNLTVYRRSGPQEFGLTLTSPEYDFNKLENIDAFKSKWEGQALSYPNFISTSIGSVNMSAFAKRKIVLRITIPKGSPGAYLSAIPGYAGEYEVLLNHGSKFKINKIDSYKDGTITKLIVDATLIP

SEQ ID NO: 74 - protein, 876 aa, Artificial Sequence
  Clostridium difficile binary toxins cdtB
MKIQMRNKKVLSFLTLTAIVSQALVYPVYAQTSTSNHSNKKKEIVNEDILPNNGLMGYYFTDEHFKDLKLMAPIKDGNLKFEEKKVDKLLDKDKSDVKSIRWTGRIIPSKDGEYTLSTDRDDVLMQVNTESTISNTLKVNMKKGKEYKVRIELQDKNLGSIDNLSSPNLYWELDGMKKIIPEENLFLRDYSNIEKDDPFIPNNNFFDPKLMSDWEDEDLDTDNDNIPDSYERNGYTIKDLIAVKWEDSFAEQGYKKYVSNYLESNTAGDPYTDYEKASGSFDKAIKTEARDPLVAAYPIVGVGMEKLIISTNEHASTDQGKTVSRATTNSKTESNTAGVSVNVGYQNGFTANVTTNYSHTTDNSTAVQDSNGESWNTGLSINKGESAYINANVRYYNTGTAPMYKVTPTTNLVLDGDTLSTIKAQENQIGNNLSPGDTYPKKGLSPLALNTMDQFSSRLIPINYDQLKKLDAGKQIKLETTQVSGNFGTKNSSGQIVTEGNSWSDYISQIDSISASIILDTENESYERRVTAKNLQDPEDKTPELTIGEAIEKAFGATKKDGLLYFNDIPIDESCVELIFDDNTANKIKDSLKTLSDKKIYNVKLERGMNILIKTPTYFTNFDDYNNYPSTWSNVNTTNQDGLQGSANKLNGETKIKIPMSELKPYKRYVFSGYSKDPLTSNSIIVKIKAKEEKTDYLVPEQGYTKFSYEFETTEKDSSNIEITLIGSGTTYLDNLSITELSSTPEILDEPEVKIPTDQEIMDAHKIYFADLNFNPSTGNTYINGMYFAPTQTNKEALDYIQKYRVEATLQYSGFKDIGTKDKEMRNYLGDPNQPKTNYVNLRSYFTGGENIMTYKKLRIYAITPDDRELLVLSVD

SEQ ID NO: 75 - protein, 926 aa, Artificial Sequence
  Fusion protein STF2.cdtA
MAQVINTNSLSLLTQNNLNKSQSALGTAIERLSSGLRINSAKDDAAGQAIANRFTANIKGLTQASRNANDGISIAQTTEGALNEINNNLQRVRELAVQSANSTNSQSDLDSIQAEITQRLNEIDRVSGQTQFNGVKVLAQDNTLTIQVGANDGETIDIDLKQINSQTLGLDSLNVQKAYDVKDTAVTTKAYANNGTTLDVSGLDDAAIKAATGGTNGTASVTGGAVKFDADNNKYFVTIGGFTGADAAKNGDYEVNVATDGTVTLAAGATKTTMPAGATTKTEVQELKDTPAVVSADAKNALIAGGVDATDANGAELVKMSYTDKNGKTIEGGYALKAGDKYYAADYDEATGAIKAKTTSYTAADGTTKTAANQLGGVDGKTEVVTIDGKTYNASKAAGHDFKAQPELAEAAAKTTENPLQKIDAALAQVDALRSDLGAVQNRFNSAITNLGNTVNNLSEARSRIEDSDYATEVSNMSRAQILQQAGTSVLAQANQVPQNVLSLLAVCNTTYKAPIERPEDFLKDKEKAKEWERKEAERIEQKLERSEKEALESYKKDSVEISKYSQTRNYFYDYQIEANSREKEYKELRNAISKNKIDKPMYVYYFESPEKFAFNKVIRTENQNEISLEKFNEFKETIQNKLFKQDGFKDISLYEPGKGDEKPTPLLMHLKLPRNTGMLPYTNTNNVSTLIEQGYSIKIDKIVRIVIDGKHYIKAEASVVSSLDFKDDVSKGDSWGKANYNDWSNKLTPNELADVNDYMRGGYTAINNYLISNGPVVNPNPELDSKITNIENALKREPIPTNLTVYRRSGPQEFGLTLTSPEYDFNKLENIDAFKSKWEGQALSYPNFIYTSIGSVNMSAFAKRKIVLRITIPKGSPGAYLSAIPGYAGAYAVLLNHGSKFKINKIDSYKDGTITKLIVDATLIP

SEQ ID NO: 76 - protein, 900 aa, Artificial Sequence
  Fusion protein STF2.ED
MAQVINTNSLSLLTQNNLNKSQSALGTAIERLSSGLRINSAKDDAAGQAIANRFTANIKGLTQASRNANDGISIAQTTEGALNEINNNLQRVRELAVQSANSTNSQSDLDSIQAEITQRLNEIDRVSGQTQFNGVKVLAQDNTLTIQVGANDGETIDIDLKQINSQTLGLDSLNVQKAYDVKDTAVTTKAYANNGTTLDVSGLDDAAIKAATGGTNGTASVTGGAVKFDADNNKYFVTIGGFTGADAAKNGDYEVNVATDGTVTLAAGATKTTMPAGATTKTEVQELKDTPAVVSADAKNALIAGGVDATDANGAELVKMSYTDKNGKTIEGGYALKAGDKYYAADYDEATGAIKAKTTSYTAADGTTKTAANQLGGVDGKTEVVTIDGKTYNASKAAGHDFKAQPELAEAAAKTTENPLQKIDAALAQVDALRSDLGAVQNRFNSAITNLGNTVNNLSEARSRIEDSDYATEVSNMSRAQILQQAGTSVLAQANQVPQNVLSLLAERKEAERIEQKLERSEKEALESYKKDSVEISKYSQTRNYFYDYQIEANSREKEYKELRNAISKNKIDKPMYVYYFESPEKFAFNKVIRTENQNEISLEKFNEFKETIQNKLFKQDGFKDISLYEPGKGDEKPTPLLMHLKLPRNTGMLPYTNTNNVSTLIEQGYSIKIDKIVRIVIDGKHYIKAEASVVSSLDFKDDVSKGDSWGKANYNDWSNKLTPNELADVNDYMRGGYTAINNYLISNGPVVNPNPELDSKITNIENALKREPIPTNLTVYRRSGPQEFGLTLTSPEYDFNKLENIDAFKSKWEGQALSYPNFIYTSIGSVNMSAFAKRKIVLRITIPKGSPGAYLSAIPGYAGAYAVLLNHGSKFKINKIDSYKDGTITKLIVDATLIP

SEQ ID NO: 77 - protein, 1352 aa, Artificial Sequence
  Fusion protein STF2.cdtB
MAQVINTNSLSLLTQNNLNKSQSALGTAIERLSSGLRINSAKDDAAGQAIANRFTANIKGLTQASRNANDGISIAQTTEGALNEINNNLQRVRELAVQSANSTNSQSDLDSIQAEITQRLNEIDRVSGQTQFNGVKVLAQDNTLTIQVGANDGETIDIDLKQINSQTLGLDSLNVQKAYDVKDTAVTTKAYANNGTTLDVSGLDDAAIKAATGGTNGTASVTGGAVKFDADNNKYFVTIGGFTGADAAKNGDYEVNVATDGTVTLAAGATKTTMPAGATTKTEVQELKDTPAVVSADAKNALIAGGVDATDANGAELVKMSYTDKNGKTIEGGYALKAGDKYYAADYDEATGAIKAKTTSYTAADGTTKTAANQLGGVDGKTEVVTIDGKTYNASKAAGHDFKAQPELAEAAAKTTENPLQKIDAALAQVDALRSDLGAVQNRFNSAITNLGNTVNNLSEARSRIEDSDYATEVSNMSRAQILQQAGTSVLAQANQVPQNVLSLLAQTSTSNHSNKKKEIVNEDILPNNGLMGYYFTDEHFKDLKLMAPIKDGNLKFEEKKVDKLLDKDKSDVKSIRWTGRIIPSKDGEYTLSTDRDDVLMQVNTESTISNTLKVNMKKGKEYKVRIELQDKNLGSIDNLSSPNLYWELDGMKKIIPEENLFLRDYSNIEKDDPFIPNNNFFDPALMSDWEDEDLDTDNDNIPDSYERNGYTIKDLIAVKWEDSFAEQGYKKYVSNYLESNTAGDPYTDYEKASGSFDKAIKTEARDPLVAAYPIVGVGMEKLIISTNEHASTDQGKTVSRATTNSKTESNTAGVSVNVGYQNGFTANVTTNYSHTTDNSTAVQDSNGESWNTGLSINKGESAYINANVRYYNTGTAPMYKVTPTTNLVLDGDTLSTIKAQENQIGNNLSPGDTYPKKGLSPLALNTMDQFSSRLIPINYDQLKKLDAGKQIKLETTQVSGNFGTKNSSGQIVTEGNSWSDYISQIDSISASIILDTENESYERRVTAKNLQDPEDKTPELTIGEAIEKAFGATKKDGLLYFNDIPIDESCVELIFDDNTANKIKDSLKTLSDKKIYNVKLERGMNILIKTPTYFTNFDDYNNYPSTWSNVNTTNQDGLQGSANKLNGETKIKIPMSELKPYKRYVFSGYSKDPLTSNSIIVKIKAKEEKTDYLVPEQGYTKFSYEFETTEKDSSNIEITLIGSGTTYLDNLSITELSSTPEILDEPEVKIPTDQEIMDAHKIYFADLNFNPSTGNTYINGMYFAPTQTNKEALDYIQKYRVEATLQYSGFKDIGTKDKEMRNYLGDPNQPKTNYVNLRSYFTGGENIMTYKKLRIYAITPDDRELLVLSVD

SEQ ID NO: 78 - protein, 852 aa, Artificial Sequence
  Fusion protein HL186, STF2R3.2X CA07
MAQVINTNSLSLLTQNNLNKSQSALGTAIERLSSGLRINSAKDDAAGQAIANRFTANIKGLTQASRNANDGISIAQTTEGALNEINNNLQRVRELAVQSANSTNSQSDLDSIQAEITQRLNEIDRVSGQTQFNGVKVLAQDNTLTIQVGANDGETIDIDLKQINSQTLGLDSLNVQKAYDVKDTAVTTKAGVAPLHLGKCNIAGWILGNPECESLSTASSWSYIVETPSSDNGTCYPGDFIDYEELREQLSSVSSFERFEIFPKTSSWPNHDSNKGVTAACPHAGAKSFYKNLIWLVKKGNSYPKLSKSYINDKGKEVLVLWGIHHPSTSADQQSLYQNADAYVFVGSSRYSKKFKPEIAIRPKVRDQEGRMNYYWTLVEPGDKITFEATGNLVVPRYAFAMERNAGSGIIISSVVSADAKNALIAGGVDATDANGAELVKMSYTDKNGKTIEGGYALKAGDKYYAADYDEATGAIKAKTTSYTAADGTTKTAANQLGGVDGKTEVVTIDGKTYNASKAAGHDFKAQPELAEAAAKTTENPLQKIDAALAQVDALRSDLGAVQNRFNSAITNLGNTVNNLSEARSRIEDSDYATEVSNMSRAQILQQAGTSVLAQANQVPQNVLSLLASGVAPLHLGKCNIAGWILGNPECESLSTASSWSYIVETPSSDNGTCYPGDFIDYEELREQLSSVSSFERFEIFPKTSSWPNHDSNKGVTAACPHAGAKSFYKNLIWLVKKGNSYPKLSKSYINDKGKEVLVLWGIHHPSTSADQQSLYQNADAYVFVGSSRYSKKFKPEIAIRPKVRDQEGRMNYYWTLVEPGDKITFEATGNLVVPRYAFAMERNAGSGIIIS

SEQ ID NO: 79 - protein, 730 aa, Artificial Sequence
  Fusion protein HL184, STF2R3 CA07
MAQVINTNSLSLLTQNNLNKSQSALGTAIERLSSGLRINSAKDDAAGQAIANRFTANIKGLTQASRNANDGISIAQTTEGALNEINNNLQRVRELAVQSANSTNSQSDLDSIQAEITQRLNEIDRVSGQTQFNGVKVLAQDNTLTIQVGANDGETIDIDLKQINSQTLGLDSLNVQKAYDVKDTAVTTKAYANNGTTLDVSGLDDAAIKAATGGTNGTASVTGGAVKFDADNNKYFVTIGGFTGADAAKNGDYEVNVATDGTVTLAAGATKTTMPAGATTKTEVQELKDTPAVVSADAKNALIAGGVDATDANGAELVKMSYTDKNGKTIEGGYALKAGDKYYAADYDEATGAIKAKTTSYTAADGTTKTAANQLGGVDGKTEVVTIDGKTYNASKAAGHDFKAQPELAEAAAKTTENPLQKIDAALAQVDALRSDLGAVQNRFNSAITNLGNTVNNLSEARSRIEDSDYATEVSNMSRAQILQQAGTSVLAQANQVPQNVLSLLASGVAPLHLGKCNIAGWILGNPECESLSTASSWSYIVETPSSDNGTCYPGDFIDYEELREQLSSVSSFERFEIFPKTSSWPNHDSNKGVTAACPHAGAKSFYKNLIWLVKKGNSYPKLSKSYINDKGKEVLVLWGIHHPSTSADQQSLYQNADAYVFVGSSRYSKKFKPEIAIRPKVRDQEGRMNYYWTLVEPGDKITFEATGNLVVPRYAFAMERNAGSGIIIS

SEQ ID NO: 80 - protein, 12 aa, Artificial Sequence
  Peptide Linker
  MOD_RES (4)...(7): Xaa = any material amino acid
  MOD_RES 9: Xaa = Phe or Tyr
GVFXXXXGXEYF

SEQ ID NO: 81 - protein, 506 aa, Artificial Sequence
  Salmonella typhimurium FljB, flagellin
MAQVINTNSLSLLTQNNLNKSQSALGTAIERLSSGLRINSAKDDAAGQAIANRFTANIKGLTQASRNANDGISIAQTTEGALNEINNNLQRVRELAVQSANSTNSQSDLDSIQAEITQRLNEIDRVSGQTQFNGVKVLAQDNTLTIQVGANDGETIDIDLKQINSQTLGLDSLNVQKAYDVKDTAVTTKAYANNGTTLDVSGLDDAAIKAATGGTNGTASVTGGAVKFDADNNKYFVTIGGFTGADAAKNGDYEVNVATDGTVTLAAGATKTTMPAGATTKTEVQELKDTPAVVSADAKNALIAGGVDATDANGAELVKMSYTDKNGKTIEGGYALKAGDKYYAADYDEATGAIKAKTTSYTAADGTTKTAANQLGGVDGKTEVVTIDGKTYNASKAAGHDFKAQPELAEAAAKTTENPLQKIDAALAQVDALRSDLGAVQNRFNSAITNLGNTVNNLSEARSRIEDSDYATEVSNMSRAQILQQAGTSVLAQANQVPQNVLSLLR

SEQ ID NO: 82 - protein, 595 aa, Artificial Sequence
  E. coli flagellin FliC
MAQVINTNSLSLITQNNINKNQSALSSSIERLSSGLRINSAKDDAAGQAIANRFTSNIKGLTQAARNANDGISVAQTTEGALSEINNNLQRIRELTVQASTGTNSDSDLDSIQDEIKSRLDEIDRVSGQTQFNGVNVLAKDGSMKIQVGANDGQTITIDLKKIDSDTLGLNGFNVNGSGTIANKAATISDLTAAKMDAATNTITTTNNALTASKALDQLKDGDTVTIKADAAQTATVYTYNASAGNFSFSNVSNNTSAKAGDVAASLLPPAGQTASGVYKAASGEVNFDVDANGKITIGGQEAYLTSDGNLTTNDAGGATAATLDGLFKKAGDGQSIGFNKTASVTMGGTTYNFKTGADAGAATANAGVSFTDTASKETVLNKVATAKQGTAVAANGDTSATITYKSGVQTYQAVFAAGDGTASAKYADNTDVSNATATYTDADGEMTTIGSYTTKYSIDANNGKVTVDSGTGTGKYAPKVGAEVYVSANGTLTTDATSEGTVTKDPLKALDEAISSIDKFRSSLGAIQNRLDSAVTNLNNTTTNLSEAQSRIQDADYATEVSNMSKAQIIQQAGNSVLAKANQVPQQVLSLLQG

SEQ ID NO: 83 - protein, 317 aa, Artificial Sequence
  Flagellin from B. Subtilis
MRINHNIAALNTSRQLNAGSDSAAKNMEKLSSGLRINRAGDDAAGLAISEKMRSQIRGLDMASKNAQDGISLIQTSEGALNETHSILQRMSELATQAANDTNTDSDRSELQKEMDQLASEVTRISTDTEFNTKKLLDGTAQNLTFQIGANEGQTMSLSINKMDSESLKVGTTYTVSGDQNTLTATDGSTATWADADDATNKPAGYYDAGGKVIASEKLAADSKVTKGIDISSSAKAASSALTTIKTAIDTVSSERAKLGAVQNRLEHTINNLGTSSENLTSAESRIRDVDMASEMMEYTKNNILTQASQAMLAQANQ

SEQ ID NO: 84 - protein, 506 aa, Artificial Sequence
  Flagellin from S. muenchen
MAQVINTNSLSLLTQNNLNKSQSALGTAIERLSSGLRINSAKDDAAGQAIANRFTANIKGLTQASRNANDGISIAQTTEGALNEINNNLQRVRELAVQSANGTNSQSDLDSIQAEITQRLNEIDRVSGQTQFNGVKVLAQDNTLTIQVGANDGETIDIDLKEISSKTLGLDKLNVQDAYTPKETAVTVDKTTYKNGTDTITAQSNTDIQTAIGGGATGVTGADIKFKDGQYYLDVKGGASAGVYKATYDETTKKVNIDTTDKTPLATAEATAIRGTATITHNQIAEVTKEGVDTTTVAAQLAAAGVTGADKDNTSLVKLSFEDKNGKVIDGGYAVKMGDDFYAATYDEKTGTITAKTTTYTDGAGVAQTGAVKFGGANGKSEVVTATDGKTYLASDLDKHNFRTGGELKEVNTDKTENPLQKIDAALAQVDTLRSDLGAVQNRFNSAITNLGNTVNNLSSARSRIEDSDYATEVSNMSRAQILQQAGTSVLAQANQVPQNVLSLLR

SEQ ID NO: 85 - protein, 504 aa, Artificial Sequence
  Flagellin from S. muenchen
AQVINTNSLSLLTQNNLNKSQSALGTAIERLSSGLRINSAKDDAAGQAIANRFTANIKGLTQASRNANDGISIAQTTEGALNEINNNLQRVRELAVQSANGTNSQSDLDSIQAEITQRLNEIDRVSGQTQFNGVKVLAQDNTLTIQVGANDGETIDIDLKEISSKTLGLDKLNVQDAYTPKETAVTVDKTTYKNGTDTITAQSNTDIQTAIGGGATGVTGADIKFKDGQYYLDVKGGASAGVYKATYDETTKKVNIDTTDKTPLATAEATAIRGTATITHNQIAEVTKEGVDTTTVAAQLAAAGVTGADKDNTSLVKLSFEDKNGKVIDGGYAVKMGDDFYAATYDEKQVQLLLNNHYTDGAGVLQTGAVKFGGANGKSEVVTATVGKTYLASDLDKHNFRTGGELKEVNTDKTENPLQKIDAALAQVDTLRSDLGAVQNRFNSAITNLGNTVNNLSSARSRIEDSDYATEVSNMSRAQILQQAGTSVLAQANQVPQNVLSLLR

SEQ ID NO: 86 - protein, 393 aa, Artificial Sequence
  Flagellin from P. aeruginosa
ALTVNTNIASLNTQRNLNNSSASLNTSLQRLSTGSRINSAKDDAAGLQIANRLTSQVNGLNVATKNANDGISLAQTAEGALQQSTNILQRMRDLSLQSANGSNSDSERTALNGEVKQLQKELDRISNTTTFGGRKLLDGSFGVASFQVGSAANEIISVGIDEMSAESLNGTYFKADGGGAVTAATASGTVDIAIGITGGSAVNVKVDMKGNETAEQAAAKIAAAVNDANVGIGAFSDGDTISYVSKAGKDGSGAITSAVSGVVIADTGSTGVGTAAGVTPSATAFAKTNDTVAKIDISTAKGAQSAVLVIDEAIKQIDAQRADLGAVQNRFDNTINNLKNIGENVSAARGRIEDTDFAAETANLTKNQVLQQAGTAILAQANQLPQSVLSLLR

SEQ ID NO: 87 - protein, 287 aa, Artificial Sequence
  Flagellin from Listeria monocytogenes
MKVNTNIISLKTQEYLRKNNEGMTQAQERLASGKRINSSLDDAAGLAVVTRMNVKSTGLDAASKNSSMGIDLLQTADSALSSMSSILQRMRQLAVQSSNGSFSDEDRKQYTAEFGSLIKELDHVADTTNYNNIKLLDQTATNAATQVSIQASDKANDLINIDLFNAKGLSAGTITLGSGSTVAGYSALSVADADSSQEATEAIDELINNISNGRALLGAGMSRLSYNVSNVNNQSIATKASASSIEDADMAAEMSEMTKYKILTQTSISMLSQANQTPQMLTQLINS

SEQ ID NO: 88 - protein, 595 aa, Artificial Sequence
  Flagellin from E. coli
MAQVINTNSLSLITQNNINKNQSALSSSIERLSSGLRINSAKDDAAGQAIANRFTSNIKGLTQAARNANDGISVAQTTEGALSEINNNLQRIRELTVQASTGTNSDSDLDSIQDEIKSRLDEIDRVSGQTQFNGVNVLAKDGSMKIQVGANDGQTITIDLKKIDSDTLGLNGFNVNGSGTIANKAATISDLTAAKMDAATNTITTTNNALTASKALDQLKDGDTVTIKADAAQTATVYTYNASAGNFSLSNVSNNTSEKAGDVAASLLPPAGQTASGVYKAASGEVNFDVDANGKITIGGQKAYLTSDGNLTTNDAGGATAATLDGLFKKAGDGQSIGFKKTASVTMGGTTYNFKTGADADAATANAGVSFTDTASKETVLNKVATAKQGKAAAADGDTSATITYKSGVQTYQAVFAAGDGTASAKYADKADVSNATATYTDADGEMTTIGSYTTKYSIDANNGKVTVDSGTGTGKYAPKVGAEVYVSANGTLTTDATSEGTVTKDPLKALDEAISSIDKFRSSLGAIQNRLDSAVTNLNNTTTNLSEAQSRIQDADYATEVSNMSKAQIIQQAGNSVLAKANQVPQQVLSLLQG

SEQ ID NO: 89 - protein, 497 aa, Artificial Sequence
  Flagellin from E. coli
AQVINTNSLSLITQNNINKNQSALSSSIERLSSGLRINSAKDDAAGQAIANRFTSNIKGLTQAARNANDGISVAQTTEGALSEINNNLQRVRELTVQATTGTNSESDLSSIQDEIKSRLDEIDRVSGQTQFNGVNVLAKNGSMKIQVGANDNQTITIDLKQIDAKTLGLDGFSVKNNDTVTTSAPVTAFGATTTNNIKLTGITLSTEAATDTGGTNPASIEGVYTDNGNDYYAKITGGDNDGKYYAVTVANDGTVTMATGATANATVTDANTTKATTITSGGTPVQIDNTAGSATANLGAVSLVKLQDSKGNDTDTYALKDTNGNLYAADVNETTGAVSVKTITYTDSSGAASSPTAVKLGGDDGKTEVVDIDGKTYDSADLNGGNLQTGLTAGGEALTAVANGKTTDPLKALDDAIASVDKFRSSLGAVQNRLDSAVTNLNNTTTNLSEAQSRIQDADYATEVSNMSKAQIIQQAGNSVLAKANQVPQQVLSLLQG

SEQ ID NO: 90 - protein, 130 aa, Artificial Sequence
  f1 fragment for toxin A
NRYYFEPNTAMGANGYKTIDNKNFYFRNGLPQIGVFKGSNGFEYFAPANTDANNIEGQAIRYQNRFLHLLGKIYYFGNNSKAVTGWQTINGKVYYFMPDTAMAAAGGLFEIDGVIYFFGVDGVKAPGIYG

SEQ ID NO: 91 - protein, 146 aa, Artificial Sequence
  f1 fragment for toxin B
KYYFNPETKKACKGINLIDDIKYYFDEKGIMRTGLISFENNNYYFNENGEMQFGYINIEDKMFYFGEDGVMQIGVFNTPDGFKYFAHQNTLDENFEGESINYTGWLDLDEKRYYFTDEYIAATGSVIIDGEEYYFDPDTAQLVISE

SEQ ID NO: 92 - protein, 4 aa, Artificial Sequence
  flexible linker
GGGG

SEQ ID NO: 93 - protein, 5 aa, Artificial Sequence
  flexible linker
GGGGG

SEQ ID NO: 94 - protein, 4 aa, Artificial Sequence
  flexible linker
SSSS

SEQ ID NO: 95 - protein, 5 aa, Artificial Sequence
  flexible linker
SSSSS

SEQ ID NO: 96 - protein, 414 aa, Artificial Sequence
  Fusion protein STF2, R3' flagellin with R405A
MAQVINTNSLSLLTQNNLNKSQSALGTAIERLSSGLRINSAKDDAAGQAIANRFTANIKGLTQASRNANDGISIAQTTEGALNEINNNLQRVRELAVQSANSTNSQSDLDSIQAEITQRLNEIDRVSGQTQFNGVKVLAQDNTLTIQVGANDGETIDIDLKQINSQTLGLDSLNVQKAYDVKDTAVTTKAYANELKDTPAVVSADAKNALIAGGVDATDANGAELVKMSYTDKNGKTIEGGYALKAGDKYYAADYDEATGAIKAKTTSYTAADGTTKTAANQLGGVDGKTEVVTIDGKTYNASKAAGHDFKAQPELAEAAAKTTENPLQKIDAALAQVDALRSDLGAVQNRFNSAITNLGNTVNNLSEARSRIEDSDYATEVSNMSRAQILQQAGTSVLAQANQVPQNVLSLLA

SEQ ID NO: 97 - protein, 1801 aa, Artificial Sequence
  Fusion protein TcdA, GGG linker between 2xRBD-A2
GFKIIDNKTYYYDEDSKLVKGLININNSLFYFDPIEFNLVTGWQTINGKKYYFDINTGAALTSYKIINGKHFYFNNDGVMQLGVFKGPDGFEYFAPANTQNNNIEGQAIVYQSKFLTLNGKKYYFDNNSKAVTGWRIINNEKYYFNPNNAIAAVGLQVIDNNKYYFNPDTAIISKGWQTVNGSRYYFDTDTAIAFNGYKTIDGKHFYFDSDCVVKIGVFSTSNGFEYFAPANTYNNNIEGQAIVYQSKFLTLNGKKYYFDNNSKAVTGWQTIDSKKYYFNTNTAEAATGWQTIDGKKYYFNTNTAEAATGWQTIDGKKYYFNTNTAIASTGYTIINGKHFYFNTDGIMQIGVFKGPNGFEYFAPANTDANNIEGQAILYQNEFLTLNGKKYYFGSDSKAVTGWRIINNKKYYFNPNNAIAAIHLCTINNDKYYFSYDGILQNGYITIERNNFYFDANNESKMVTGVFKGPNGFEYFAPANTHNNNIEGQAIVYQNKFLTLNGKKYYFDNDSKAVTGWQTIDGKKYYFNLNTAEAATGWQTIDGKKYYFNLNTAEAATGWQTIDGKKYYFNTNTFIASTGYTSINGKHFYFNTDGIMQIGVFKGPNGFEYFAPANTDANNIEGQAILYQNKFLTLNGKKYYFGSDSKAVTGLRTIDGKKYYFNTNTAVAVTGWQTINGKKYYFNTNTSIASTGYTIISGKHFYFNTDGIMQIGVFKGPDGFEYFAPANTDANNIEGQAIRYQNRFLYLHDNIYYFGNNSKAATGWVTIDGNRYYFEPNTAMGANGYKTIDNKNFYFRNGLPQIGVFKGSNGFEYFAPANTDANNIEGQAIRYQNRFLHLLGKIYYFGNNSKAVTGWQTINGKVYYFMPDTAMAAAGGLFEIDGVIYFFGVDGVKAPGIYGGGGGFKIIDNKTYYYDEDSKLVKGLININNSLFYFDPIEFNLVTGWQTINGKKYYFDINTGAALTSYKIINGKHFYFNNDGVMQLGVFKGPDGFEYFAPANTQNNNIEGQAIVYQSKFLTLNGKKYYFDNNSKAVTGWRIINNEKYYFNPNNAIAAVGLQVIDNNKYYFNPDTAIISKGWQTVNGSRYYFDTDTAIAFNGYKTIDGKHFYFDSDCVVKIGVFSTSNGFEYFAPANTYNNNIEGQAIVYQSKFLTLNGKKYYFDNNSKAVTGWQTIDSKKYYFNTNTAEAATGWQTIDGKKYYFNTNTAEAATGWQTIDGKKYYFNTNTAIASTGYTIINGKHFYFNTDGIMQIGVFKGPNGFEYFAPANTDANNIEGQAILYQNEFLTLNGKKYYFGSDSKAVTGWRIINNKKYYFNPNNAIAAIHLCTINNDKYYFSYDGILQNGYITIERNNFYFDANNESKMVTGVFKGPNGFEYFAPANTHNNNIEGQAIVYQNKFLTLNGKKYYFDNDSKAVTGWQTIDGKKYYFNLNTAEAATGWQTIDGKKYYFNLNTAEAATGWQTIDGKKYYFNTNTFIASTGYTSINGKHFYFNTDGIMQIGVFKGPNGFEYFAPANTDANNIEGQAILYQNKFLTLNGKKYYFGSDSKAVTGLRTIDGKKYYFNTNTAVAVTGWQTINGKKYYFNTNTSIASTGYTIISGKHFYFNTDGIMQIGVFKGPDGFEYFAPANTDANNIEGQAIRYQNRFLYLHDNIYYFGNNSKAATGWVTIDGNRYYFEPNTAMGANGYKTIDNKNFYFRNGLPQIGVFKGSNGFEYFAPANTDANNIEGQAIRYQNRFLHLLGKIYYFGNNSKAVTGWQTINGKVYYFMPDTAMAAAGGLFEIDGVIYFFGVDGVKAPGIYG

SEQ ID NO: 98 - protein, 1807 aa, Artificial Sequence
  Fusion protein TcdA, 2xRBD-A2 with linkers
GGGGFKIIDNKTYYYDEDSKLVKGLININNSLFYFDPIEFNLVTGWQTINGKKYYFDINTGAALTSYKIINGKHFYFNNDGVMQLGVFKGPDGFEYFAPANTQNNNIEGQAIVYQSKFLTLNGKKYYFDNNSKAVTGWRIINNEKYYFNPNNAIAAVGLQVIDNNKYYFNPDTAIISKGWQTVNGSRYYFDTDTAIAFNGYKTIDGKHFYFDSDCVVKIGVFSTSNGFEYFAPANTYNNNIEGQAIVYQSKFLTLNGKKYYFDNNSKAVTGWQTIDSKKYYFNTNTAEAATGWQTIDGKKYYFNTNTAEAATGWQTIDGKKYYFNTNTAIASTGYTIINGKHFYFNTDGIMQIGVFKGPNGFEYFAPANTDANNIEGQAILYQNEFLTLNGKKYYFGSDSKAVTGWRIINNKKYYFNPNNAIAAIHLCTINNDKYYFSYDGILQNGYITIERNNFYFDANNESKMVTGVFKGPNGFEYFAPANTHNNNIEGQAIVYQNKFLTLNGKKYYFDNDSKAVTGWQTIDGKKYYFNLNTAEAATGWQTIDGKKYYFNLNTAEAATGWQTIDGKKYYFNTNTFIASTGYTSINGKHFYFNTDGIMQIGVFKGPNGFEYFAPANTDANNIEGQAILYQNKFLTLNGKKYYFGSDSKAVTGLRTIDGKKYYFNTNTAVAVTGWQTINGKKYYFNTNTSIASTGYTIISGKHFYFNTDGIMQIGVFKGPDGFEYFAPANTDANNIEGQAIRYQNRFLYLHDNIYYFGNNSKAATGWVTIDGNRYYFEPNTAMGANGYKTIDNKNFYFRNGLPQIGVFKGSNGFEYFAPANTDANNIEGQAIRYQNRFLHLLGKIYYFGNNSKAVTGWQTINGKVYYFMPDTAMAAAGGLFEIDGVIYFFGVDGVKAPGIYGGGGGFKIIDNKTYYYDEDSKLVKGLININNSLFYFDPIEFNLVTGWQTINGKKYYFDINTGAALTSYKIINGKHFYFNNDGVMQLGVFKGPDGFEYFAPANTQNNNIEGQAIVYQSKFLTLNGKKYYFDNNSKAVTGWRIINNEKYYFNPNNAIAAVGLQVIDNNKYYFNPDTAIISKGWQTVNGSRYYFDTDTAIAFNGYKTIDGKHFYFDSDCVVKIGVFSTSNGFEYFAPANTYNNNIEGQAIVYQSKFLTLNGKKYYFDNNSKAVTGWQTIDSKKYYFNTNTAEAATGWQTIDGKKYYFNTNTAEAATGWQTIDGKKYYFNTNTAIASTGYTIINGKHFYFNTDGIMQIGVFKGPNGFEYFAPANTDANNIEGQAILYQNEFLTLNGKKYYFGSDSKAVTGWRIINNKKYYFNPNNAIAAIHLCTINNDKYYFSYDGILQNGYITIERNNFYFDANNESKMVTGVFKGPNGFEYFAPANTHNNNIEGQAIVYQNKFLTLNGKKYYFDNDSKAVTGWQTIDGKKYYFNLNTAEAATGWQTIDGKKYYFNLNTAEAATGWQTIDGKKYYFNTNTFIASTGYTSINGKHFYFNTDGIMQIGVFKGPNGFEYFAPANTDANNIEGQAILYQNKFLTLNGKKYYFGSDSKAVTGLRTIDGKKYYFNTNTAVAVTGWQTINGKKYYFNTNTSIASTGYTIISGKHFYFNTDGIMQIGVFKGPDGFEYFAPANTDANNIEGQAIRYQNRFLYLHDNIYYFGNNSKAATGWVTIDGNRYYFEPNTAMGANGYKTIDNKNFYFRNGLPQIGVFKGSNGFEYFAPANTDANNIEGQAIRYQNRFLHLLGKIYYFGNNSKAVTGWQTINGKVYYFMPDTAMAAAGGLFEIDGVIYFFGVDGVKAPGIYGGGG

SEQ ID NO: 99 - protein, 1110 aa, Artificial Sequence
  Fusion protein TcdB, GGGG linker between 2xRBD-B2
GLVSLYNEKFYINNFGMMVSGLIYINDSLYYFKPPVNNLITGFVTVGDDKYYFNPINGGAASIGETIIDDKNYYFNQSGVLQTGVFSTEDGFKYFAPANTLDENLEGEAIDFTGKLIIDENIYYFDDNYRGAVEWKELDGEMHYFSPETGKAFKGLNQIGDYKYYFNSDGVMQKGFVSINDNKHYFDDSGVMKVGYTEIDGKHFYFAENGEMQIGVFNTEDGFKYFAHHNEDLGNEEGEEISYSGILNFNNKIYYFDDSFTAVVGWKDLEDGSKYYFDEDTAEAYIGLSLINDGQYYFNDDGIMQVGFVTINDKVFYFSDSGIIESGVQNIDDNYFYIDDNGIVQIGVFDTSDGYKYFAPANTVNDNIYGQAVEYSGLVRVGEDVYYFGETYTIETGWIYDMENESDKYYFNPETKKACKGINLIDDIKYYFDEKGIMRTGLISFENNNYYFNENGEMQFGYINIEDKMFYFGEDGVMQIGVFNTPDGFKYFAHQNTLDENFEGESINYTGWLDLDEKRYYFTDEYIAATGSVIIDGEEYYFDPDTAQLVISEGGGGGLVSLYNEKFYINNFGMMVSGLIYINDSLYYFKPPVNNLITGFVTVGDDKYYFNPINGGAASIGETIIDDKNYYFNQSGVLQTGVFSTEDGFKYFAPANTLDENLEGEAIDFTGKLIIDENIYYFDDNYRGAVEWKELDGEMHYFSPETGKAFKGLNQIGDYKYYFNSDGVMQKGFVSINDNKHYFDDSGVMKVGYTEIDGKHFYFAENGEMQIGVFNTEDGFKYFAHHNEDLGNEEGEEISYSGILNFNNKIYYFDDSFTAVVGWKDLEDGSKYYFDEDTAEAYIGLSLINDGQYYFNDDGIMQVGFVTINDKVFYFSDSGIIESGVQNIDDNYFYIDDNGIVQIGVFDTSDGYKYFAPANTVNDNIYGQAVEYSGLVRVGEDVYYFGETYTIETGWIYDMENESDKYYFNPETKKACKGINLIDDIKYYFDEKGIMRTGLISFENNNYYFNENGEMQFGYINIEDKMFYFGEDGVMQIGVFNTPDGFKYFAHQNTLDENFEGESINYTGWLDLDEKRYYFTDEYIAATGSVIIDGEEYYFDPDTAQLVISE

SEQ ID NO: 100 - protein, 1115 aa, Artificial Sequence
  Fusion protein TcdB, 2xRBD-B2 with linkers
GGGLVSLYNEKFYINNFGMMVSGLIYINDSLYYFKPPVNNLITGFVTVGDDKYYFNPINGGAASIGETIIDDKNYYFNQSGVLQTGVFSTEDGFKYFAPANTLDENLEGEAIDFTGKLIIDENIYYFDDNYRGAVEWKELDGEMHYFSPETGKAFKGLNQIGDYKYYFNSDGVMQKGFVSINDNKHYFDDSGVMKVGYTEIDGKHFYFAENGEMQIGVFNTEDGFKYFAHHNEDLGNEEGEEISYSGILNFNNKIYYFDDSFTAVVGWKDLEDGSKYYFDEDTAEAYIGLSLINDGQYYFNDDGIMQVGFVTINDKVFYFSDSGIIESGVQNIDDNYFYIDDNGIVQIGVFDTSDGYKYFAPANTVNDNIYGQAVEYSGLVRVGEDVYYFGETYTIETGWIYDMENESDKYYFNPETKKACKGINLIDDIKYYFDEKGIMRTGLISFENNNYYFNENGEMQFGYINIEDKMFYFGEDGVMQIGVFNTPDGFKYFAHQNTLDENFEGESINYTGWLDLDEKRYYFTDEYIAATGSVIIDGEEYYFDPDTAQLVISEGGGGGLVSLYNEKFYINNFGMMVSGLIYINDSLYYFKPPVNNLITGFVTVGDDKYYFNPINGGAASIGETIIDDKNYYFNQSGVLQTGVFSTEDGFKYFAPANTLDENLEGEAIDFTGKLIIDENIYYFDDNYRGAVEWKELDGEMHYFSPETGKAFKGLNQIGDYKYYFNSDGVMQKGFVSINDNKHYFDDSGVMKVGYTEIDGKHFYFAENGEMQIGVFNTEDGFKYFAHHNEDLGNEEGEEISYSGILNFNNKIYYFDDSFTAVVGWKDLEDGSKYYFDEDTAEAYIGLSLINDGQYYFNDDGIMQVGFVTINDKVFYFSDSGIIESGVQNIDDNYFYIDDNGIVQIGVFDTSDGYKYFAPANTVNDNIYGQAVEYSGLVRVGEDVYYFGETYTIETGWIYDMENESDKYYFNPETKKACKGINLIDDIKYYFDEKGIMRTGLISFENNNYYFNENGEMQFGYINIEDKMFYFGEDGVMQIGVFNTPDGFKYFAHQNTLDENFEGESINYTGWLDLDEKRYYFTDEYIAATGSVIIDGEEYYFDPDTAQLVISEGGG

SEQ ID NO: 101 - protein, 420 aa, Artificial Sequence
  C. difficile cdtA fragment
VCNTTYKAPIERPEDFLKDKEKAKEWERKEAERIEQKLERSEKEALESYKKDSVEISKYSQTRNYFYDYQIEANSREKEYKELRNAISKNKIDKPMYVYYFESPEKFAFNKVIRTENQNEISLEKFNEFKETIQNKLFKQDGFKDISLYEPGKGDEKPTPLLMHLKLPRNTGMLPYTNTNNVSTLIEQGYSIKIDKIVRIVIDGKHYIKAEASVVSSLDFKDDVSKGDSWGKANYNDWSNKLTPNELADVNDYMRGGYTAINNYLISNGPVVNPNPELDSKITNIENALKREPIPTNLTVYRRSGPQEFGLTLTSPEYDFNKLENIDAFKSKWEGQALSYPNFIYTSIGSVNMSAFAKRKIVLRITIPKGSPGAYLSAIPGYAGAYAVLLNHGSKFKINKIDSYKDGTITKLIVDATLIP

SEQ ID NO: 102 - protein, 394 aa, Artificial Sequence
  C. difficile cdtA fragment
ERKEAERIEQKLERSEKEALESYKKDSVEISKYSQTRNYFYDYQIEANSREKEYKELRNAISKNKIDKPMYVYYFESPEKFAFNKVIRTENQNEISLEKFNEFKETIQNKLFKQDGFKDISLYEPGKGDEKPTPLLMHLKLPRNTGMLPYTNTNNVSTLIEQGYSIKIDKIVRIVIDGKHYIKAEASVVSSLDFKDDVSKGDSWGKANYNDWSNKLTPNELADVNDYMRGGYTAINNYLISNGPVVNPNPELDSKITNIENALKREPIPTNLTVYRRSGPQEFGLTLTSPEYDFNKLENIDAFKSKWEGQALSYPNFIYTSIGSVNMSAFAKRKIVLRITIPKGSPGAYLSAIPGYAGAYAVLLNHGSKFKINKIDSYKDGTITKLIVDATLIP

SEQ ID NO: 103 - protein, 846 aa, Artificial Sequence
  C. difficile cdtB fragment
QTSTSNHSNKKKEIVNEDILPNNGLMGYYFTDEHFKDLKLMAPIKDGNLKFEEKKVDKLLDKDKSDVKSIRWTGRIIPSKDGEYTLSTDRDDVLMQVNTESTISNTLKVNMKKGKEYKVRIELQDKNLGSIDNLSSPNLYWELDGMKKIIPEENLFLRDYSNIEKDDPFIPNNNFFDPALMSDWEDEDLDTDNDNIPDSYERNGYTIKDLIAVKWEDSFAEQGYKKYVSNYLESNTAGDPYTDYEKASGSFDKAIKTEARDPLVAAYPIVGVGMEKLIISTNEHASTDQGKTVSRATTNSKTESNTAGVSVNVGYQNGFTANVTTNYSHTTDNSTAVQDSNGESWNTGLSINKGESAYINANVRYYNTGTAPMYKVTPTTNLVLDGDTLSTIKAQENQIGNNLSPGDTYPKKGLSPLALNTMDQFSSRLIPINYDQLKKLDAGKQIKLETTQVSGNFGTKNSSGQIVTEGNSWSDYISQIDSISASIILDTENESYERRVTAKNLQDPEDKTPELTIGEAIEKAFGATKKDGLLYFNDIPIDESCVELIFDDNTANKIKDSLKTLSDKKIYNVKLERGMNILIKTPTYFTNFDDYNNYPSTWSNVNTTNQDGLQGSANKLNGETKIKIPMSELKPYKRYVFSGYSKDPLTSNSIIVKIKAKEEKTDYLVPEQGYTKFSYEFETTEKDSSNIEITLIGSGTTYLDNLSITELSSTPEILDEPEVKIPTDQEIMDAHKIYFADLNFNPSTGNTYINGMYFAPTQTNKEALDYIQKYRVEATLQYSGFKDIGTKDKEMRNYLGDPNQPKTNYVNLRSYFTGGENIMTYKKLRIYAITPDDRELLVLSVD

1. A composition comprising:
a) a first fusion protein that activates Toll-like Receptor 5 and includes flagellin fused to at least one Clostridium difficile toxin A antigen;
b) a second fusion protein that activates Toll-like Receptor 5 and includes flagellin fused to at least one Clostridium difficile toxin B antigen, and
c) a third fusion protein that activates Toll-like Receptor 5 and includes flagellin fused to at least one Clostridium difficile binary toxin antigen.

2.-7. (canceled)

8. A fusion protein comprising flagellin fused at the carboxy-terminal amino acid of the flagellin to at least one Clostridium difficile antigen selected from the group consisting of a portion or the entirety of a receptor binding domain of Clostridium difficile, a portion or the entirety of a translocation domain of Clostridium difficile and a portion of the entirety of an enzymatic domain of Clostridium difficile.

9.-12. (canceled)

13. A fusion protein comprising a flagellin protein in which at least a portion of or the entirety of domain 3 of the flagellin protein has been replaced with a first Clostridium difficile antigen and a second Clostridium difficile antigen is fused to the carboxy-terminal amino acid of the flagellin protein, wherein the fusion protein activates Toll-like Receptor 5.

14.-30. (canceled)

31. A method of treating a human, comprising the step of administering to the human at least one fusion protein that includes flagellin fused at the carboxy-terminal amino acid of the flagellin to at least one Clostridium difficile antigen selected from the group consisting of a portion or the entirety of a receptor binding domain of Clostridium difficile, a portion or the entirety of a translocation domain of Clostridium difficile and a portion of the entirety of a glucosyltransferase domain, whereby administration of the fusion protein ameliorates a Clostridium difficile associated disease.

32. The method of claim 31, whereby administration of the fusion protein to the human ameliorates the Clostridium difficile associated disease by generating neutralizing antibodies in the human to at least one Clostridium difficile antigen.

33. The method of claim 31, wherein the human administered the fusion protein is at least 49 years old.

34. The method of claim 31, wherein the human administered the fusion protein is at least about 50 years old to about 64 years old.

35. The method of claim 31, wherein the human administered the fusion protein is at least about 65 years old.

36. The method of claim 31, wherein the human administered the fusion protein is about 1 years old, about 2 years old, about 3 years old, about 4 years old, about 5 years old or about 6 years old.

37. The method of claim 31, wherein the human administered the fusion protein is between about 13 years old and about 18 years old.

38. The method of claim 31, wherein the human administered the fusion protein is a peripartum woman.

39. The method of claim 31, whereby the Clostridium difficile associated disease that is ameliorated following administration of the fusion protein is an antibiotic-associated diarrhea.

40. The method of claim 31, whereby the Clostridium difficile associated disease that is ameliorated following administration of the fusion protein is pseudomembranous colitis.

41. The method of claim 31, wherein the fusion protein is administered to the human in a single dose.

42. The method of claim 31, wherein the fusion protein is administered to the human in multiple doses.

43. The method of claim 31, wherein the fusion protein is administered to the human at a dose of at least one member selected from the group consisting of 0.5 μg, 1.0 μg, 1.5 μg, 5 μg, 10 μg, 20 μg, 40 μg and 80 μg of the fusion protein.

44. The method of claim 31, wherein the fusion protein of the composition administered to the human is associated with at least one member selected from the group consisting of a virosome and a virus-like particle.

45. The method of claim 31, wherein the flagellin of the fusion protein administered to the human is fused to the portion or the entirety of the receptor binding domain of Clostridium difficile toxin A.

46. The fusion protein of claim 31, wherein the flagellin of the fusion protein administered to the human is fused, in sequence, to a portion or the entirety of the translocation domain of Clostridium difficile toxin B and a portion or the entirety of the receptor binding domain of Clostridium difficile toxin B.

47. The fusion protein of claim 31, wherein the flagellin of the fusion protein administered to the human is fused to the portion or the entirety of the receptor binding domain of Clostridium difficile toxin B.

48. A method of treating a human, comprising the step of administering to the human at least one fusion protein that activates Toll-like Receptor 5 and includes flagellin in which at least a portion of or the entirety of domain 3 of the flagellin has been replaced with a first Clostridium difficile antigen and a second Clostridium difficile antigen is fused to the carboxy-terminal amino acid of the flagellin, whereby administration of the fusion protein ameliorates a Clostridium difficile associated disease.

49.-73. (canceled)
